(19) United States
(12) Patent Application Publication
(10) Pub. No.: US 2024/0294921 A1
(43) Pub. Date: Sep. 5, 2024

(54) MUSCLE TARGETING COMPLEXES AND USES THEREOF FOR TREATING POMPE DISEASE

(71) Applicant: Dyne Therapeutics, Inc., Waltham, MA (US)

(72) Inventors: Romesh R. Subramanian, Framingham, MA (US); Cody A. Desjardins, Waltham, MA (US); Oxana Beskrovnaya, Waltham, MA (US); Timothy Weeden, Waltham, MA (US); Mohammed T. Qatanani, Waltham, MA (US); Brendan Quinn, Boston, MA (US); John Najim, Waltham, MA (US); Victor Kotelianski, Newton, MA (US); Duncan Brown, Berkeley, CA (US)

(73) Assignee: Dyne Therapeutics, Inc., Waltham, MA (US)

(21) Appl. No.: 18/572,260

(22) PCT Filed: Jun. 17, 2022
(86) PCT No.: PCT/US2022/033974

§ 371 Date: Dec. 20, 2023

Related U.S. Application Data
(60) Provisional application No. 63/212,838, filed on Jun. 21, 2021.

(51) Int. Cl. C12N 15/113; A61K 47/68

(52) U.S. Cl. CPC C12N 15/1137; A61K 47/6807; A61K 47/6849; C12N 2310/11; C12N 2310/14; C12N 2310/313; C12N 2310/321; C12N 2310/322; C12N 2310/3513

(57) ABSTRACT

Aspects of the disclosure relate to oligonucleotides (e.g., RNAi oligonucleotides such as siRNAs) designed to target GYSI RNAs and targeting complexes for delivering the oligonucleotides to cells (e.g., muscle cells) and uses thereof, particularly uses relating to treatment of disease (e.g., Pompe Disease).

### RELATED APPLICATIONS

[0001] This application claims priority under 35 U.S.C. § 119(e) to U.S. Provisional Application No. 63/212,838, entitled “MUSCLE-TARGETING COMPLEXES AND USES THEREOF FOR TREATING POMPE DISEASE”, filed on Jun. 21, 2021, the contents of which are incorporated herein by reference in their entirety.

### REFERENCE TO SEQUENCE LISTING SUBMITTED AS A TEXT FILE VIA EFS-WEB

[0002] The instant application contains a sequence listing which has been submitted in ASCII format via EFS-Web and is hereby incorporated by reference in its entirety. Said ASCII copy, created on Jun. 17, 2022, is named D082470051WO00-SEQ-ZJG and is 2,228,617 bytes in size.

### FIELD OF THE INVENTION

[0003] The present application relates to oligonucleotides designed to target GYS1 RNAs and targeting complexes for delivering molecular payloads (e.g., oligonucleotides) to cells and uses thereof, particularly uses relating to treatment of disease.

### BACKGROUND

[0004] Lysosomal storage diseases are a group of inherited disorders caused by deficiencies in lysosomal hydrolyases or transmembrane proteins. These diseases are often characterized by the progressive accumulate of various undigested substrates and a dysregulation of cellular trafficking pathways. Pompe disease (PD) is an autosomal recessive lysosomal storage disorder characterized by the build-up of glycogen in muscle cells, which leads to progressive muscle weakness, reduced muscle tone (hypotonia), cardiac enlargement, and difficulty breathing. Symptoms are often present at birth in severe cases, although onset may occur throughout life and Pompe disease affects approximately 1 in 40,000 people in the United States. Glycogen is synthesized by numerous enzymes, including glycogen synthase 1 (encoded by the GYS1 gene).

### SUMMARY

[0005] In some aspects, the disclosure provides oligonucleotides designed to target GYS1 RNAs. In some embodiments, the disclosure provides oligonucleotides complementary with GYS1 RNA that are useful for reducing levels of GYS1 mRNA and/or protein associated with features of Pompe disease (PD) pathology, including toxic build-up of glycogen in muscle cells, which leads to progressive muscle weakness, reduced muscle tone (hypotonia), cardiac enlargement, and difficulty breathing. In some embodiments, the oligonucleotides provided herein are designed to direct RNAi mediated degradation of GYS1 RNA. In some embodiments, the oligonucleotides provided herein are designed to reduce expression level (e.g., RNA and/or protein level) of GYS1. In some embodiments, the oligonucleotides are designed to efficiently engage the RNA-induced silencing complex (RISC) for degradation of the GYS1 RNA but also have reduced off-target effect. In some embodiments, the oligonucleotides are designed to have desirable bioavailability and/or serum-stability properties. In some embodiments, the oligonucleotides are designed to have desirable binding affinity properties. In some embodiments, the oligonucleotides are designed to have desirable toxicity and/or immunogenicity profiles.

[0006] According to some aspects, the disclosure provides complexes that target muscle cells (e.g., primary myoblasts) for purposes of delivering molecular payloads (e.g., the GYS1-targeting oligonucleotides described herein) to those cells. In some embodiments, complexes provided herein are particularly useful for delivering molecular payloads that inhibit the expression or activity of GYS1, e.g., in a subject having or suspected of having PD. Accordingly, in some embodiments, complexes provided herein comprise muscle-targeting agents (e.g., muscle targeting antibodies) that specifically bind to receptors on the surface of muscle cells for purposes of delivering molecular payloads to the muscle cells. In some embodiments, the complexes are taken up into the cells via a receptor mediated internalization, following which the molecular payload may be released to perform a function inside the cells. For example, complexes engineered to deliver oligonucleotides may release the oligonucleotides such that the oligonucleotides can inhibit GYS1 gene expression in the muscle cells. In some embodiments, the oligonucleotides are released by endosomal cleavage of covalent linkers connecting oligonucleotides and muscle-targeting agents of the complexes.

[0007] Some aspects of the present disclosure provide complexes comprising a muscle-targeting agent covalently linked to an oligonucleotide comprising an antisense strand targeting a glycogen synthase 1 (GYS1) RNA, wherein the antisense strand comprises a region of complementarity to a target sequence as set forth in any one of SEQ ID NOs: 266-7493 and SEQ ID NOs: 162-186, wherein the region of complementarity is at least 12 consecutive nucleosides in length.

[0008] In some embodiments, the muscle-targeting agent is an anti-transferrin receptor 1 (TfR1) antibody.

[0009] In some embodiments, the region of complementary is at least 16 nucleotides in length. In some embodiments, the antisense strand comprises the nucleotide sequence of any one of SEQ ID NOs: 7494-11107 and 212-236, wherein each of the Us are optionally and independently Ts. In some embodiments, the antisense strand is 18-25 nucleotides in length, optionally wherein the antisense strand is 23 nucleotides in length. In some embodiments, the oligonucleotide further comprises a sense strand which comprises at least 18 consecutive nucleosides complementary to the antisense strand. In some embodiments, the antisense strand comprises the nucleotide sequence of any one of SEQ ID NOs: 212-236 and the sense strand comprises the nucleotide sequence of any one of SEQ ID NOs: 187-211, wherein each of the Us are optionally and independently Ts.

[0010] In some embodiments, the oligonucleotide comprises one or more modified nucleosides. In some embodiments, the one or more modified nucleosides are 2′ modified nucleotides. In some embodiments, the one or more 2′ modified nucleosides are selected from: 2′-fluoro (2′-F), 2′-O-methyl (2′-O-Me), 2′-O-methoxyethyl (2′-MOE), 2′-O-aminopropyl (2′-O-AP), 2′-O-dimethylaminoethyl (2′-O-DMAOE), 2′-O-dimethylaminopropyl (2′-O-DMAP), 2′-O-dimethylaminoethyloxyethyl (2′-O-DMAEOE), 2′-O—N-methylacetamido (2′-O-NMA)). In some embodiments, each 2′ modified nucleotide is 2′-O-methyl or 2′-fluoro (2′-F).

[0011] In some embodiments, the oligonucleotide comprises one or more phosphorothioate internucleoside linkages. In some embodiments, the one or more phosphorothioate internucleoside linkage are present on the antisense strand of the oligonucleotide. In some embodiments, the antisense strand comprises two phosphorothioate internucleoside linkages. In some embodiments, the two internucleoside linkages at the 3′ end of the antisense strand are phosphorothioate internucleoside linkages.

[0012] In some embodiments, the antisense strand is selected from the modified version of SEQ ID NOs: 212-236 listed in Table 8. In some embodiments, the sense strand is selected from the modified version of SEQ ID NOs: 187-211 listed in Table 8. In some embodiments, the oligonucleotide is an siRNA molecule selected from the siRNAs listed in Table 8.

[0013] In some embodiments, the anti-TfR1 antibody comprises a heavy chain complementarity determining region 1 (CDR-H1), a heavy chain complementarity determining region 2 (CDR-H2), a heavy chain complementarity determining region 3 (CDR-H3), a light chain complementarity determining region 1 (CDR-L1), a light chain complementarity determining region 2 (CDR-L2), a light chain complementarity determining region 3 (CDR-L3) of any of the anti-TfR1 antibodies listed in Table 2. In some embodiments, the anti-TfR1 antibody comprises a heavy chain variable region (VH) and a light chain variable region (VL) of any of the anti-TfR1 antibodies listed in Table 3. In some embodiments, the anti-TfR1 antibody is a Fab. In some embodiments, the Fab comprises a heavy chain and a light chain of any of the anti-TfR1 Fabs listed in Table 5.

[0014] In some embodiments, the muscle targeting agent and the oligonucleotide are covalently linked via a linker. In some embodiments, the linker comprises a valine-citrulline sequence.

[0015] Other aspects of the present disclosure provide methods of reducing GYS1 expression in a muscle cell, the method comprising contacting the muscle cell with an effective amount of the complex described herein for promoting internalization of the RNAi oligonucleotide to the muscle cell. In some embodiments, the complex reduces GYS1 RNA level in the muscle cell.

[0016] Other aspects of the present disclosure provide methods of treating Pompe disease (PD), the method comprising administering to a subject in need thereof an effective amount of the complex described herein.

[0017] Further provided herein are siRNA oligonucleotide comprising a pair of an antisense strand and a sense strand selected from the following pairs:

Antisense strand:
(SEQ ID NO: 212)
5′-fUfCmGfAmAfUmUfCmAfUmCfCmUfCmCfCmAfGmUfCmC*fU*mC-3′
Sense strand:
(SEQ ID NO: 187)
5′-mGmGfAmCfUmGfGmGfAmGfGmAfUmGfAmAfUmUfCmGfA-3′
Antisense strand:
(SEQ ID NO: 213)
5′-fGfUmCfGmAfAmUfUmCfAmUfCmCfUmCfCmCfAmGfUmC*fC*mU-3′
Sense strand:
(SEQ ID NO: 188)
5′-mGmAfCmUfGmGfGmAfGmGfAmUfGmAfAmUfUmCfGmAfC-3′
Antisense strand:
(SEQ ID NO: 214)
5′-fUfAmGfAmUfGmCfCmAfCmCfCmAfCmCfUmUfGmUfUmA*fG*mC-3′
Sense strand:
(SEQ ID NO: 189)
5′-mUmAfAmCfAmAfGmGfUmGfGmGfUmGfGmCfAmUfCmUfA-3′
Antisense strand:
(SEQ ID NO: 215)
5′-fUfGmUfAmGfAmUfGmCfCmAfCmCfCmAfCmCfUmUfGmU*fU*mA-3′
Sense strand:
(SEQ ID NO: 190)
5′-mAmCfAmAfGmGfUmGfGmGfUmGfGmCfAmUfCmUfAmCfA-3′
Antisense strand:
(SEQ ID NO: 216)
5′-fCfUmUfCmGfCmCfUmUfCmGfUmCfUmGfCmAfGmCfAmC*fC*mG-3′
Sense strand:
(SEQ ID NO: 191)
5′-mGmUfGmCfUmGfCmAfGmAfCmGfAmAfGmGfCmGfAmAfG-3′
Antisense strand:
(SEQ ID NO: 217)
5′-fAfCmCfUmUfCmGfCmCfUmUfCmGfUmCfUmGfCmAfGmC*fA*mC-3′
Sense strand:
(SEQ ID NO: 192)
5′-mGmCfUmGfCmAfGmAfCmGfAmAfGmGfCmGfAmAfGmGfU-3′
Antisense strand:
(SEQ ID NO: 218)
5′-fUfCmAfCmCfUmUfCmGfCmCfUmUfCmGfUmCfUmGfCmA*fG*mC-3′
Sense strand:
(SEQ ID NO: 193)
5′-mUmGfCmAfGmAfCmGfAmAfGmGfCmGfAmAfGmGfUmGfA-3′
Antisense strand:
(SEQ ID NO: 219)
5′-fGfUmCfAmCfCmUfUmCfGmCfCmUfUmCfGmUfCmUfGmC*fA*mG-3′
Sense strand:
(SEQ ID NO: 194)
5′-mGmCfAmGfAmCfGmAfAmGfGmCfGmAfAmGfGmUfGmAfC-3′
Antisense strand:
(SEQ ID NO: 220)
5′-fCfCmCfUmUfGmCfUmGfUmUfCmAfUmGfGmAfAmUfCmC*fA*mG-3′
Sense strand:
(SEQ ID NO: 195)
5′-mGmGfAmUfUmCfCmAfUmGfAmAfCmAfGmCfAmAfGmGfG-3′
Antisense strand:
(SEQ ID NO: 221)
5′-fCfCmAfGmGfUmUfGmUfUmGfUmAfGmAfAmGfUmCfCmA*fC*mG-3′
Sense strand:
(SEQ ID NO: 196)
5′-mUmGfGmAfCmUfUmCfUmAfCmAfAmCfAmAfCmCfUmGfG-3′
Antisense strand:
(SEQ ID NO: 222)
5′-fCfUmGfAmGfCmAfGmAfUmAfGmUfUmGfAmGfCmCfGmA*fG*mC-3′
Sense strand:
(SEQ ID NO: 197)
5′-mUmCfGmGfCmUfCmAfAmCfUmAfUmCfUmGfCmUfCmAfG-3′
Antisense strand:
(SEQ ID NO: 223)
5′-fUfCmUfGmAfGmCfAmGfAmUfAmGfUmUfGmAfGmCfCmG*fA*mG-3′
Sense strand:
(SEQ ID NO: 198)
5′-mCmGfGmCfUmCfAmAfCmUfAmUfCmUfGmCfUmCfAmGfA-3′
Antisense strand:
(SEQ ID NO: 224)
5′-fCfAmCfUmCfUmGfAmGfCmAfGmAfUmAfGmUfUmGfAmG*fC*mC-3′
Sense strand:
(SEQ ID NO: 199)
5′-mCmUfCmAfAmCfUmAfUmCfUmGfCmUfCmAfGmAfGmUfG-3′
Antisense strand:
(SEQ ID NO: 225)
5′-fUfUmCfAmCfUmCfUmGfAmGfCmAfGmAfUmAfGmUfUmG*fA*mG-3′
Sense strand:
(SEQ ID NO: 200)
5′-mCmAfAmCfUmAfUmCfUmGfCmUfCmAfGmAfGmUfGmAfA-3′
Antisense strand:
(SEQ ID NO: 226)
5′-fCfCmAfGmCfAmUfCmUfUmGfUmUfCmAfUmGfUmCfGmG*fG*mA-3′
Sense strand:
(SEQ ID NO: 201)
5′-mCmCfGmAfCmAfUmGfAmAfCmAfAmGfAmUfGmCfUmGfG-3′
Antisense strand:
(SEQ ID NO: 227)
5′-fUfGmGfCmUfCmUfCmUfUmCfAmUfCmAfUmAfGmUfGmA*fA*mG-3′
Sense strand:
(SEQ ID NO: 202)
5′-mUmCfAmCfUmAfUmGfAmUfGmAfAmGfAmGfAmGfCmCfA-3′
Antisense strand:
(SEQ ID NO: 228)
5′-fAfUmUfCmGfGmCfGmGfAmUfGmGfUmGfGmUfCmAfGmG*fA*mU-3′
Sense strand:
(SEQ ID NO: 203)
5′-mCmCfUmGfAmCfCmAfCmCfAmUfCmCfGmCfCmGfAmAfU-3′
Antisense strand:
(SEQ ID NO: 229)
5′-fCfUmGfCmGfAmUfGmUfGmUfUmCfCmUfCmCfAmUfGmA*fA*mG-3′
Sense strand:
(SEQ ID NO: 204)
5′-mUmCfAmUfGmGfAmGfGmAfAmCfAmCfAmUfCmGfCmAfG-3′
Antisense strand:
(SEQ ID NO: 230)
5′-fUfCmUfGmCfGmAfUmGfUmGfUmUfCmCfUmCfCmAfUmG*fA*mA-3′
Sense strand:
(SEQ ID NO: 205)
5′-mCmAfUmGfGmAfGmGfAmAfCmAfCmAfUmCfGmCfAmGfA-3′
Antisense strand:
(SEQ ID NO: 231)
5′-fGfAmAfUmCfAmUfCmCfAmGfGmCfUmGfCmGfGmAfAmC*fC*mG-3′
Sense strand:
(SEQ ID NO: 206)
5′-mGmUfUmCfCmGfCmAfGmCfCmUfGmGfAmUfGmAfUmUfC-3′
Antisense strand:
(SEQ ID NO: 232)
5′-fGfCmCfAmUfGmUfGmGfCmGfCmGfCmAfGmAfCmAfUmA*fU*mA-3′
Sense strand:
(SEQ ID NO: 207)
5′-mUmAfUmGfUmCfUmGfCmGfCmGfCmCfAmCfAmUfGmGfC-3′
Antisense strand:
(SEQ ID NO: 233)
5′-fGfCmUfCmUfCmUfUmCfAmUfCmAfUmAfGmUfGmAfAmG*fU*mC-3′
Sense strand:
(SEQ ID NO: 208)
5′-mCmUfUmCfAmCfUmAfUmGfAmUfGmAfAmGfAmGfAmGfC-3′
Antisense strand:
(SEQ ID NO: 234)
5′-fAfAmCfUmUfCmUfUmCfAmCfAmUfUmCfAmGfCmCfCmA*fU*mU-3′
Sense strand:
(SEQ ID NO: 209)
5′-mUmGfGmGfCmUfGmAfAmUfGmUfGmAfAmGfAmAfGmUfU-3′
Antisense strand:
(SEQ ID NO: 235)
5′-fUfUmGfCmUfGmUfUmCfAmUfGmGfAmAfUmCfCmAfGmU*fG*mU-3′
Sense strand:
(SEQ ID NO: 210)
5′-mAmCfUmGfGmAfUmUfCmCfAmUfGmAfAmCfAmGfCmAfA-3′
Antisense strand:
(SEQ ID NO: 236)
5′-fUfUmCfUmCfCmAfGmGfUmUfGmUfUmGfUmAfGmAfAmG*fU*mC-3′
Sense strand:
(SEQ ID NO: 211)
5′-mCmUfUmCfUmAfCmAfAmCfAmAfCmCfUmGfGmAfGmAfA-3′

[0018] wherein “m” is 2′-O-methyl (2′-O-Me); “f” is 2′-fluoro (2′-F); “*” indicates phosphorothioate internucleoside linkage; and the absence of “*” between nucleosides indicate a phosphodiester linkage.

[0019] Compositions comprising the siRNA oligonucleotides described herein are also provided. In some embodiments, the siRNA oligonucleotide is in sodium salt form.

### BRIEF DESCRIPTION OF THE DRAWINGS

[0020] FIG. 1 depicts a non-limiting schematic showing the effect of transfecting cells with an siRNA.

[0021] FIG. 2 depicts a non-limiting schematic showing the activity of a muscle targeting complex comprising an siRNA.

[0022] FIGS. 3A-3B depict non-limiting schematics showing the activity of a muscle targeting complex comprising an siRNA in mouse muscle tissues (gastrocnemius and heart) in vivo, relative to control experiments. (N=4 C57BL/6 WT mice)

[0023] FIGS. 4A-4E depict non-limiting schematics showing the tissue selectivity of a muscle targeting complex comprising an siRNA.

[0024] FIGS. 5A-5H show that conjugates having an anti-TfR1 Fab conjugated to a DMPK-targeting oligonucleotide reduced mouse DMPK expression in various muscle tissues in a mouse model that expresses human TfR1. The DMPK-targeting oligonucleotide was conjugated to anti-TfR1 Fab 3M12-VH4/VK3. FIG. 5A shows that the conjugate reduced mouse wild-type Dmpk in Tibialis Anterior by 79%. FIG. 5B shows that the conjugate reduced mouse wild-type Dmpk in gastrocnemius by 76%. FIG. 5C shows that the conjugate reduced mouse wild-type Dmpk in the heart by 70%. FIG. 5D shows that the conjugate reduced mouse wild-type Dmpk and in diaphragm by 88%. FIGS. 5E-5H show oligonucleotide distributions in Tibialis Anterior (FIG. 5E), gastrocnemius (FIG. 5F), heart (FIG. 5G), and diaphragm (FIG. 5H). All tissues showed increased level of the oligonucleotide compared to the vehicle control.

### DETAILED DESCRIPTION

[0025] Some aspects of the present disclosure provide oligonucleotides designed to target GYS1 RNAs. In some embodiments, the disclosure provides oligonucleotides complementary with GYS1 RNA that are useful for reducing levels of GYS1 mRNA and/or protein associated with features of Pompe disease (PD) pathology, including build-up of glycogen in muscle cells, which leads to progressive muscle weakness, reduced muscle tone (hypotonia), cardiac enlargement, and difficulty breathing. In some embodiments, the oligonucleotides provided herein are designed to direct RNAi mediated degradation of GYS1 RNA. In some embodiments, the oligonucleotides are designed to efficiently engage the RNA-induced silencing complex (RISC) for degradation of the GYS1 RNA but also have reduced off-target effect. In some embodiments, the oligonucleotides are designed to have desirable bioavailability and/or serum-stability properties. In some embodiments, the oligonucleotides are designed to have desirable binding affinity properties. In some embodiments, the oligonucleotides are designed to have desirable toxicity and/or immunogenicity profiles.

[0026] In some aspects, the present disclosure provides complexes comprising muscle-targeting agents covalently linked to GYS1-targeting oligonucleotides for effective delivery of the oligonucleotides to muscle cells. In some embodiments, the complexes are particularly useful for delivering molecular payloads that inhibit the expression or activity of target genes in muscle cells, e.g., in a subject having or suspected of having a rare muscle disease. For example, in some embodiments, complexes are provided for targeting a GYS1 to treat subjects having PD. In some embodiments, complexes provided herein comprise oligonucleotides that reduce expression of GYS1 in a subject having PD.

[0027] Further aspects of the disclosure, including a description of defined terms, are provided below.

### I. Definitions

[0028] Administering: As used herein, the terms “administering” or “administration” means to provide a complex to a subject in a manner that is physiologically and/or (e.g., and) pharmacologically useful (e.g., to treat a condition in the subject).

[0029] Approximately: As used herein, the term “approximately” or “about,” as applied to one or more values of interest, refers to a value that is similar to a stated reference value. In certain embodiments, the term “approximately” or “about” refers to a range of values that fall within 15%, 14%, 13%, 12%, 11%, 10%, 9%, 8%, 7%, 6%, 5%, 4%, 3%, 2%, 1%, or less in either direction (greater than or less than) of the stated reference value unless otherwise stated or otherwise evident from the context (except where such number would exceed 100% of a possible value).

[0030] Antibody: As used herein, the term “antibody” refers to a polypeptide that includes at least one immunoglobulin variable domain or at least one antigenic determinant, e.g., paratope that specifically binds to an antigen. In some embodiments, an antibody is a full-length antibody. In some embodiments, an antibody is a chimeric antibody. In some embodiments, an antibody is a humanized antibody. However, in some embodiments, an antibody is a Fab fragment, a Fab′ fragment, a F(ab′)2 fragment, a Fv fragment or a scFv fragment. In some embodiments, an antibody is a nanobody derived from a camelid antibody or a nanobody derived from shark antibody. In some embodiments, an antibody is a diabody. In some embodiments, an antibody comprises a framework having a human germline sequence. In another embodiment, an antibody comprises a heavy chain constant domain selected from the group consisting of IgG, IgG1, IgG2, IgG2A, IgG2B, IgG2C, IgG3, IgG4, IgA1, IgA2, IgD, IgM, and IgE constant domains. In some embodiments, an antibody comprises a heavy (H) chain variable region (abbreviated herein as VH), and/or (e.g., and) a light (L) chain variable region (abbreviated herein as VL). In some embodiments, an antibody comprises a constant domain, e.g., an Fc region. An immunoglobulin constant domain refers to a heavy or light chain constant domain. Human IgG heavy chain and light chain constant domain amino acid sequences and their functional variations are known. With respect to the heavy chain, in some embodiments, the heavy chain of an antibody described herein can be an alpha (α), delta (Δ), epsilon (ε), gamma (γ) or mu (μ) heavy chain. In some embodiments, the heavy chain of an antibody described herein can comprise a human alpha (α), delta (Δ), epsilon (ε), gamma (γ) or mu (μ) heavy chain. In a particular embodiment, an antibody described herein comprises a human gamma 1 CH1, CH2, and/or (e.g., and) CH3 domain. In some embodiments, the amino acid sequence of the VH domain comprises the amino acid sequence of a human gamma (γ) heavy chain constant region, such as any known in the art. Non-limiting examples of human constant region sequences have been described in the art, e.g., see U.S. Pat. No. 5,693,780 and Kabat E A et al., (1991) supra. In some embodiments, the VH domain comprises an amino acid sequence that is at least 70%, 75%, 80%, 85%, 90%, 95%, 98%, or at least 99% identical to any of the variable chain constant regions provided herein. In some embodiments, an antibody is modified, e.g., modified via glycosylation, phosphorylation, sumoylation, and/or (e.g., and) methylation. In some embodiments, an antibody is a glycosylated antibody, which is conjugated to one or more sugar or carbohydrate molecules. In some embodiments, the one or more sugar or carbohydrate molecule are conjugated to the antibody via N-glycosylation, O-glycosylation, C-glycosylation, glypiation (GPI anchor attachment), and/or (e.g., and) phosphoglycosylation. In some embodiments, the one or more sugar or carbohydrate molecule are monosaccharides, disaccharides, oligosaccharides, or glycans. In some embodiments, the one or more sugar or carbohydrate molecule is a branched oligosaccharide or a branched glycan. In some embodiments, the one or more sugar or carbohydrate molecule includes a mannose unit, a glucose unit, an N-acetylglucosamine unit, an N-acetylgalactosamine unit, a galactose unit, a fucose unit, or a phospholipid unit. In some embodiments, an antibody is a construct that comprises a polypeptide comprising one or more antigen binding fragments of the disclosure linked to a linker polypeptide or an immunoglobulin constant domain. Linker polypeptides comprise two or more amino acid residues joined by peptide bonds and are used to link one or more antigen binding portions. Examples of linker polypeptides have been reported (see e.g., Holliger, P., et al. (1993) Proc. Natl. Acad. Sci. USA 90:6444-6448; Poljak, R. J., et al. (1994) Structure 2:1121-1123). Still further, an antibody may be part of a larger immunoadhesion molecule, formed by covalent or noncovalent association of the antibody or antibody portion with one or more other proteins or peptides. Examples of such immunoadhesion molecules include use of the streptavidin core region to make a tetrameric scFv molecule (Kipriyanov, S. M., et al. (1995) Human Antibodies and Hybridomas 6:93-101) and use of a cysteine residue, a marker peptide and a C-terminal polyhistidine tag to make bivalent and biotinylated scFv molecules (Kipriyanov, S. M., et al. (1994) Mol. Immunol. 31:1047-1058).

[0031] CDR: As used herein, the term “CDR” refers to the complementarity determining region within antibody variable sequences. A typical antibody molecule comprises a heavy chain variable region (VH) and a light chain variable region (VL), which are usually involved in antigen binding. The VH and VL regions can be further subdivided into regions of hypervariability, also known as “complementarity determining regions” (“CDR”), interspersed with regions that are more conserved, which are known as “framework regions” (“FR”). Each VH and VL is typically composed of three CDRs and four FRs, arranged from amino-terminus to carboxy-terminus in the following order: FR1, CDR1, FR2, CDR2, FR3, CDR3, FR4. The extent of the framework region and CDRs can be precisely identified using methodology known in the art, for example, by the Kabat definition, the IMGT definition, the Chothia definition, the AbM definition, and/or (e.g., and) the contact definition, all of which are well known in the art. Sec. e.g., Kabat, E. A., et al. (1991) Sequences of Proteins of Immunological Interest, Fifth Edition, U.S. Department of Health and Human Services, NIH Publication No. 91-3242; IMGT®, the international ImMunoGeneTics information System® www.imgt.org. Lefranc, M.-P. et al., Nucleic Acids Res., 27:209-212 (1999); Ruiz, M. et al., Nucleic Acids Res., 28:219-221 (2000); Lefranc, M.-P., Nucleic Acids Res., 29:207-209 (2001); Lefranc, M.-P., Nucleic Acids Res., 31:307-310 (2003); Lefranc, M.-P. et al., In Silico Biol., 5, 0006 (2004) [Epub], 5:45-60 (2005); Lefranc, M.-P. et al., Nucleic Acids Res., 33:D593-597 (2005); Lefranc, M.-P. et al., Nucleic Acids Res., 37:D1006-1012 (2009); Lefranc, M.-P. et al., Nucleic Acids Res., 43:D413-422 (2015); Chothia et al., (1989) Nature 342:877; Chothia, C. et al. (1987) J. Mol. Biol. 196:901-917, Al-lazikani et al (1997) J. Molec. Biol. 273:927-948; and Almagro, J. Mol. Recognit. 17:132-143 (2004). See also hgmp.mrc.ac.uk and bioinf.org.uk/abs. As used herein, a CDR may refer to the CDR defined by any method known in the art. Two antibodies having the same CDR means that the two antibodies have the same amino acid sequence of that CDR as determined by the same method, for example, the IMGT definition.

[0032] There are three CDRs in each of the variable regions of the heavy chain and the light chain, which are designated CDR1, CDR2 and CDR3, for each of the variable regions. The term “CDR set” as used herein refers to a group of three CDRs that occur in a single variable region capable of binding the antigen. The exact boundaries of these CDRs have been defined differently according to different systems. The system described by Kabat (Kabat et al., Sequences of Proteins of Immunological Interest (National Institutes of Health, Bethesda, Md. (1987) and (1991)) not only provides an unambiguous residue numbering system applicable to any variable region of an antibody, but also provides precise residue boundaries defining the three CDRs. These CDRs may be referred to as Kabat CDRs. Sub-portions of CDRs may be designated as L1, L2 and L3 or H1, H2 and H3 where the “L” and the “H” designates the light chain and the heavy chains regions, respectively. These regions may be referred to as Chothia CDRs, which have boundaries that overlap with Kabat CDRs. Other boundaries defining CDRs overlapping with the Kabat CDRs have been described by Padlan (FASEB J. 9:133-139 (1995)) and MacCallum (J Mol Biol 262(5):732-45 (1996)). Still other CDR boundary definitions may not strictly follow one of the above systems, but will nonetheless overlap with the Kabat CDRs, although they may be shortened or lengthened in light of prediction or experimental findings that particular residues or groups of residues or even entire CDRs do not significantly impact antigen binding. The methods used herein may utilize CDRs defined according to any of these systems. Examples of CDR definition systems are provided in Table 1.

TABLE 1
CDR Definitions

| | IMGT¹ | Kabat² | Chothia³ |
|---|---|---|---|
| CDR-H1 | 27-38 | 31-35 | 26-32 |
| CDR-H2 | 56-65 | 50-65 | 53-55 |
| CDR-H3 | 105-116/117 | 95-102 | 96-101 |
| CDR-L1 | 27-38 | 24-34 | 26-32 |
| CDR-L2 | 56-65 | 50-56 | 50-52 |
| CDR-L3 | 105-116/117 | 89-97 | 91-96 |

¹IMGT ®, the international ImMunoGeneTics information system ®, imgt.org, Lefranc, M.-P. et al., Nucleic Acids Res., 27: 209-212 (1999)
²Kabat et al. (1991) Sequences of Proteins of Immunological Interest, Fifth Edition, U.S. Department of Health and Human Services, NIH Publication No. 91-3242
³Chothia et al., J. Mol. Biol. 196: 901-917 (1987))

[0033] CDR-grafted antibody: The term “CDR-grafted antibody” refers to antibodies which comprise heavy and light chain variable region sequences from one species but in which the sequences of one or more of the CDR regions of VH and/or (e.g., and) VL are replaced with CDR sequences of another species, such as antibodies having murine heavy and light chain variable regions in which one or more of the murine CDRs (e.g., CDR3) has been replaced with human CDR sequences.

[0034] Chimeric antibody: The term “chimeric antibody” refers to antibodies which comprise heavy and light chain variable region sequences from one species and constant region sequences from another species, such as antibodies having murine heavy and light chain variable regions linked to human constant regions.

[0035] Complementary: As used herein, the term “complementary” refers to the capacity for precise pairing between two nucleosides or two sets of nucleosides. In particular, complementary is a term that characterizes an extent of hydrogen bond pairing that brings about binding between two nucleosides or two sets of nucleosides. For example, if a base at one position of an oligonucleotide is capable of hydrogen bonding with a base at the corresponding position of a target nucleic acid (e.g., an mRNA), then the bases are considered to be complementary to each other at that position. Base pairings may include both canonical Watson-Crick base pairing and non-Watson-Crick base pairing (e.g., Wobble base pairing and Hoogsteen base pairing). For example, in some embodiments, for complementary base pairings, adenosine-type bases (A) are complementary to thymidine-type bases (T) or uracil-type bases (U), that cytosine-type bases (C) are complementary to guanosine-type bases (G), and that universal bases such as 3-nitropyrrole or 5-nitroindole can hybridize to and are considered complementary to any A, C. U, or T. Inosine (I) has also been considered in the art to be a universal base and is considered complementary to any A, C, U or T.

[0036] Conservative amino acid substitution: As used herein, a “conservative amino acid substitution” refers to an amino acid substitution that does not alter the relative charge or size characteristics of the protein in which the amino acid substitution is made. Variants can be prepared according to methods for altering polypeptide sequence known to one of ordinary skill in the art such as are found in references which compile such methods, e.g., Molecular Cloning: A Laboratory Manual, J. Sambrook, et al., eds., Fourth Edition, Cold Spring Harbor Laboratory Press, Cold Spring Harbor, New York, 2012, or Current Protocols in Molecular Biology, F. M. Ausubel, et al., eds., John Wiley & Sons, Inc., New York. Conservative substitutions of amino acids include substitutions made amongst amino acids within the following groups: (a) M, I, L, V; (b) F. Y, W; (c) K. R. H; (d) A, G; (c) S. T; (f) Q. N; and (g) E, D.

[0037] Covalently linked: As used herein, the term “covalently linked” refers to a characteristic of two or more molecules being linked together via at least one covalent bond. In some embodiments, two molecules can be covalently linked together by a single bond, e.g., a disulfide bond or disulfide bridge, that serves as a linker between the molecules. However, in some embodiments, two or more molecules can be covalently linked together via a molecule that serves as a linker that joins the two or more molecules together through multiple covalent bonds. In some embodiments, a linker may be a cleavable linker. However, in some embodiments, a linker may be a non-cleavable linker.

[0038] Cross-reactive: As used herein and in the context of a targeting agent (e.g., antibody), the term “cross-reactive,” refers to a property of the agent being capable of specifically binding to more than one antigen of a similar type or class (e.g., antigens of multiple homologs, paralogs, or orthologs) with similar affinity or avidity. For example, in some embodiments, an antibody that is cross-reactive against human and non-human primate antigens of a similar type or class (e.g., a human transferrin receptor and non-human primate transferrin receptor) is capable of binding to the human antigen and non-human primate antigens with a similar affinity or avidity. In some embodiments, an antibody is cross-reactive against a human antigen and a rodent antigen of a similar type or class. In some embodiments, an antibody is cross-reactive against a rodent antigen and a non-human primate antigen of a similar type or class. In some embodiments, an antibody is cross-reactive against a human antigen, a non-human primate antigen, and a rodent antigen of a similar type or class.

[0039] Framework: As used herein, the term “framework” or “framework sequence” refers to the remaining sequences of a variable region minus the CDRs. Because the exact definition of a CDR sequence can be determined by different systems, the meaning of a framework sequence is subject to correspondingly different interpretations. The six CDRs (CDR-L1, CDR-L2, and CDR-L3 of light chain and CDR-H1, CDR-H2, and CDR-H3 of heavy chain) also divide the framework regions on the light chain and the heavy chain into four sub-regions (FR1, FR2, FR3 and FR4) on each chain, in which CDR1 is positioned between FR1 and FR2, CDR2 between FR2 and FR3, and CDR3 between FR3 and FR4. Without specifying the particular sub-regions as FR1, FR2, FR3 or FR4, a framework region, as referred by others, represents the combined FRs within the variable region of a single, naturally occurring immunoglobulin chain. As used herein, a FR represents one of the four sub-regions, and FRs represents two or more of the four sub-regions constituting a framework region. Human heavy chain and light chain acceptor sequences are known in the art. In one embodiment, the acceptor sequences known in the art may be used in the antibodies disclosed herein.

[0040] GAA: As used herein, the term “GAA” refers to a gene that encodes acid alpha-glucosidase, a protein which breaks down glycogen in lysosomes. In some embodiments, GAA may be a human (Gene ID: 2548), non-human primate (e.g., Gene ID: 712054, Gene ID: 454940), or rodent gene (e.g., Gene ID: 14387, Gene ID: 367562). In humans, expression of a mutant GAA protein results in Pompe disease. In addition, multiple transcript variants (e.g., as annotated under GenBank RefSeq Accession Numbers: NM_000152.4, NM_001079803.2, and NM_001079804.2) have been characterized that encode different protein isoforms.

[0041] GAA allele: As used herein, the term “GAA allele” refers to any one of alternative forms (e.g., wild-type or mutant forms) of a GAA gene. In some embodiments, a GAA allele may encode for wild-type acid alpha-glucosidase that retains its normal and typical functions. In some embodiments, a GAA allele may comprise one or more mutations associated with Pompe disease, such as, for example, is disclosed in Moravej, et al. “A New Mutation Causing Severe Infantile-Onset Pompe Disease Responsive to Enzyme Replacement Therapy.” Iran J Med Sci. 2018; and van der Wal E., et al, “GAA Deficiency in Pompe Disease Is Alleviated by Exon Inclusion in iPSC-Derived Skeletal Muscle Cells” Mol Ther Nucleic Acids. 2017 Jun. 16; 7: 101-115; the entire contents of each of which are hereby incorporated by reference.

[0042] GYS1: As used herein, the term “GYS1” refers to a gene that encodes glycogen synthase, a protein which functions in the synthesis of glycogen. In some embodiments, GYS1 may be a human (Gene ID: 2997), non-human primate (e.g., Gene ID: 574233, Gene ID: 456196, Gene ID: 102134439), or rodent gene (e.g., Gene ID: 14936, Gene ID: 690987). In humans, expression of a mutant GYS1 protein results in decreased glycogen synthesis. In addition, multiple human transcript variants (e.g., as annotated under GenBank RefSeq Accession Numbers: NM_001161587.1 and NM_002103.4) have been characterized that encode different protein isoforms.

[0043] Human antibody: The term “human antibody”, as used herein, is intended to include antibodies having variable and constant regions derived from human germline immunoglobulin sequences. The human antibodies of the disclosure may include amino acid residues not encoded by human germline immunoglobulin sequences (e.g., mutations introduced by random or site-specific mutagenesis in vitro or by somatic mutation in vivo), for example in the CDRs and in particular CDR3. However, the term “human antibody”, as used herein, is not intended to include antibodies in which CDR sequences derived from the germline of another mammalian species, such as a mouse, have been grafted onto human framework sequences.

[0044] Humanized antibody: The term “humanized antibody” refers to antibodies which comprise heavy and light chain variable region sequences from a non-human species (e.g., a mouse) but in which at least a portion of the VH and/or (e.g., and) VL sequence has been altered to be more “human-like”, i.e., more similar to human germline variable sequences. One type of humanized antibody is a CDR-grafted antibody, in which human CDR sequences are introduced into non-human VH and VL sequences to replace the corresponding non-human CDR sequences. In one embodiment, humanized anti-transferrin receptor 1 (TfR1) antibodies and antigen binding portions are provided. Such antibodies may be generated by obtaining murine anti-transferrin receptor 1 (TfR1) monoclonal antibodies using traditional hybridoma technology followed by humanization using in vitro genetic engineering, such as those disclosed in Kasaian et al PCT publication No. WO 2005/123126 A2.

[0045] Internalizing cell surface receptor: As used herein, the term, “internalizing cell surface receptor” refers to a cell surface receptor that is internalized by cells, e.g., upon external stimulation, e.g., ligand binding to the receptor. In some embodiments, an internalizing cell surface receptor is internalized by endocytosis. In some embodiments, an internalizing cell surface receptor is internalized by clathrin-mediated endocytosis. However, in some embodiments, an internalizing cell surface receptor is internalized by a clathrin-independent pathway, such as, for example, phagocytosis, macropinocytosis, caveolae- and raft-mediated uptake or constitutive clathrin-independent endocytosis. In some embodiments, the internalizing cell surface receptor comprises an intracellular domain, a transmembrane domain, and/or (e.g., and) an extracellular domain, which may optionally further comprise a ligand-binding domain. In some embodiments, a cell surface receptor becomes internalized by a cell after ligand binding. In some embodiments, a ligand may be a muscle-targeting agent or a muscle-targeting antibody. In some embodiments, an internalizing cell surface receptor is a transferrin receptor.

[0046] Isolated antibody: An “isolated antibody”, as used herein, is intended to refer to an antibody that is substantially free of other antibodies having different antigenic specificities (e.g., an isolated antibody that specifically binds transferrin receptor is substantially free of antibodies that specifically bind antigens other than transferrin receptor). An isolated antibody that specifically binds transferrin receptor complex may, however, have cross-reactivity to other antigens, such as transferrin receptor molecules from other species. Moreover, an isolated antibody may be substantially free of other cellular material and/or (e.g., and) chemicals.

[0047] Kabat numbering: The terms “Kabat numbering”, “Kabat definitions and “Kabat labeling” are used interchangeably herein. These terms, which are recognized in the art, refer to a system of numbering amino acid residues which are more variable (i.e. hypervariable) than other amino acid residues in the heavy and light chain variable regions of an antibody, or an antigen binding portion thereof (Kabat et al. (1971) Ann. NY Acad, Sci. 190:382-391 and, Kabat, E. A., et al. (1991) Sequences of Proteins of Immunological Interest, Fifth Edition, U.S. Department of Health and Human Services, NIH Publication No. 91-3242). For the heavy chain variable region, the hypervariable region ranges from amino acid positions 31 to 35 for CDR1, amino acid positions 50 to 65 for CDR2, and amino acid positions 95 to 102 for CDR3. For the light chain variable region, the hypervariable region ranges from amino acid positions 24 to 34 for CDR1, amino acid positions 50 to 56 for CDR2, and amino acid positions 89 to 97 for CDR3.

[0048] Molecular payload: As used herein, the term “molecular payload” refers to a molecule or species that functions to modulate a biological outcome. In some embodiments, a molecular payload is linked to, or otherwise associated with a muscle-targeting agent. In some embodiments, a molecular payload is covalently linked to a muscle-targeting agent. In some embodiments, the molecular payload is a small molecule, a protein, a peptide, a nucleic acid, or an oligonucleotide. In some embodiments, the molecular payload functions to modulate the transcription of a DNA sequence, to modulate the expression of a protein, or to modulate the activity of a protein. In some embodiments, the molecular payload is an oligonucleotide that comprises a strand having a region of complementarity to a target gene.

[0049] Muscle-targeting agent: As used herein, the term, “muscle-targeting agent,” refers to a molecule that specifically binds to an antigen expressed on muscle cells. The antigen in or on muscle cells may be a membrane protein, for example an integral membrane protein or a peripheral membrane protein. Typically, a muscle-targeting agent specifically binds to an antigen on muscle cells that facilitates internalization of the muscle-targeting agent (and any associated molecular payload) into the muscle cells. In some embodiments, a muscle-targeting agent specifically binds to an internalizing, cell surface receptor on muscles and is capable of being internalized into muscle cells through receptor mediated internalization. In some embodiments, the muscle-targeting agent is a small molecule, a protein, a peptide, a nucleic acid (e.g., an aptamer), or an antibody. In some embodiments, the muscle-targeting agent is linked to a molecular payload.

[0050] Muscle-targeting antibody: As used herein, the term, “muscle-targeting antibody,” refers to a muscle-targeting agent that is an antibody that specifically binds to an antigen found in or on muscle cells. In some embodiments, a muscle-targeting antibody specifically binds to an antigen on muscle cells that facilitates internalization of the muscle-targeting antibody (and any associated molecular payment) into the muscle cells. In some embodiments, the muscle-targeting antibody specifically binds to an internalizing, cell surface receptor present on muscle cells. In some embodiments, the muscle-targeting antibody is an antibody that specifically binds to a transferrin receptor.

[0051] Oligonucleotide: As used herein, the term “oligonucleotide” refers to an oligomeric nucleic acid compound of up to 200 nucleotides in length. Examples of oligonucleotides include, but are not limited to, RNAi oligonucleotides (e.g., siRNAs, shRNAs), microRNAs, gapmers, mixmers, phosphorodiamidate morpholinos, peptide nucleic acids, aptamers, guide nucleic acids (e.g., Cas9 guide RNAs), etc. Oligonucleotides may be single-stranded or double-stranded. In some embodiments, an oligonucleotide may comprise one or more modified nucleosides (e.g., 2′-O-methyl sugar modifications, purine or pyrimidine modifications). In some embodiments, an oligonucleotide may comprise one or more modified internucleoside linkages. In some embodiments, an oligonucleotide may comprise one or more phosphorothioate linkages, which may be in the Rp or Sp stereochemical conformation.

[0052] Pompe disease (PD): As used herein the term “Pompe disease (PD)” refers to a genetic disease associated with that is characterized by muscle weakness, difficulty breathing, hypotonia, and in extreme cases, cardiac enlargement leading to cardiac failure. Three categories of PD have been described, arising from when symptoms manifest. Classical infantile-onset PD begins within a few months of birth, with patients experience muscle weakness, hypotonia, enlarged liver, and heart defects. If untreated, classical infantile PD generally leads to death within the first year of life. Non-classical infantile PD usually manifests around 1 year of age and is characterized by delayed motor skills and progressive muscle weakness. This weakness leads to serious breathing problems, and most patients with non-classical infantile PD die in early childhood. Late-onset PD may not manifest until late childhood, adolescence, or adulthood and usually more mild than infantile PD. Most patients with late-onset PD experience progressive muscle weakness, which can lead to breathing problems and respiratory failure. Pompe disease (PD) is associated with OMIM Entry #232300. Pompe Disease, the genetic basis for the disease, and related symptoms are described in the art (see, e.g., Lim, et al., “Pompe disease: from pathophysiology to therapy and back again” Frontiers in Aging: Neuroscience. (2014); and Ferreira, et al. “Lysosomal storage diseases” Transl Sci Rare Dis. (2017), 5: 1-71.)

[0053] Recombinant antibody: The term “recombinant human antibody”, as used herein, is intended to include all human antibodies that are prepared, expressed, created or isolated by recombinant means, such as antibodies expressed using a recombinant expression vector transfected into a host cell (described in more details in this disclosure), antibodies isolated from a recombinant, combinatorial human antibody library (Hoogenboom H. R., (1997) TIB Tech. 15:62-70; Azzazy H., and Highsmith W. E., (2002) Clin. Biochem. 35:425-445; Gavilondo J. V., and Larrick J. W. (2002) BioTechniques 29:128-145; Hoogenboom H., and Chames P. (2000) Immunology Today 21:371-378), antibodies isolated from an animal (e.g., a mouse) that is transgenic for human immunoglobulin genes (see e.g., Taylor, L. D., et al. (1992) Nucl. Acids Res. 20:6287-6295; Kellermann S-A., and Green L. L. (2002) Current Opinion in Biotechnology 13:593-597; Little M. et al (2000) Immunology Today 21:364-370) or antibodies prepared, expressed, created or isolated by any other means that involves splicing of human immunoglobulin gene sequences to other DNA sequences. Such recombinant human antibodies have variable and constant regions derived from human germline immunoglobulin sequences. In certain embodiments, however, such recombinant human antibodies are subjected to in vitro mutagenesis (or, when an animal transgenic for human Ig sequences is used, in vivo somatic mutagenesis) and thus the amino acid sequences of the VH and VL regions of the recombinant antibodies are sequences that, while derived from and related to human germline VH and VL sequences, may not naturally exist within the human antibody germline repertoire in vivo. One embodiment of the disclosure provides fully human antibodies capable of binding human transferrin receptor which can be generated using techniques well known in the art, such as, but not limited to, using human Ig phage libraries such as those disclosed in Jermutus et al., PCT publication No. WO 2005/007699 A2.

[0054] Region of complementarity: As used herein, the term “region of complementarity” refers to a nucleotide sequence, e.g., of an oligonucleotide, that is sufficiently complementary to a cognate nucleotide sequence, e.g., of a target nucleic acid, such that the two nucleotide sequences are capable of annealing to one another under physiological conditions (e.g., in a cell). In some embodiments, a region of complementarity is fully complementary to a cognate nucleotide sequence of target nucleic acid. However, in some embodiments, a region of complementarity is partially complementary to a cognate nucleotide sequence of target nucleic acid (e.g., at least 80%, 90%, 95% or 99% complementarity). In some embodiments, a region of complementarity contains 1, 2, 3, or 4 mismatches compared with a cognate nucleotide sequence of a target nucleic acid.

[0055] Specifically binds: As used herein, the term “specifically binds” refers to the ability of a molecule to bind to a binding partner with a degree of affinity or avidity that enables the molecule to be used to distinguish the binding partner from an appropriate control in a binding assay or other binding context. With respect to an antibody, the term, “specifically binds”, refers to the ability of the antibody to bind to a specific antigen with a degree of affinity or avidity, compared with an appropriate reference antigen or antigens, that enables the antibody to be used to distinguish the specific antigen from others, e.g., to an extent that permits preferential targeting to certain cells, e.g., muscle cells, through binding to the antigen, as described herein. In some embodiments, an antibody specifically binds to a target if the antibody has a K_{D} for binding the target of at least about 10⁻⁴ M, 10⁻⁵ M, 10⁻⁶ M, 10⁻⁷ M, 10⁻⁸ M, 10⁻⁹ M, 10⁻¹⁰ M, 10⁻¹¹ M, 10⁻¹² M, 10⁻¹³ M, or less. In some embodiments, an antibody specifically binds to the transferrin receptor, e.g., an epitope of the apical domain of transferrin receptor.

[0056] Subject: As used herein, the term “subject” refers to a mammal. In some embodiments, a subject is non-human primate, or rodent. In some embodiments, a subject is a human. In some embodiments, a subject is a patient, e.g., a human patient that has or is suspected of having a disease. In some embodiments, the subject is a human patient who has or is suspected of having PD.

[0057] Transferrin receptor: As used herein, the term, “transferrin receptor” (also known as TFRC, CD71, p90, or TFR1) refers to an internalizing cell surface receptor that binds transferrin to facilitate iron uptake by endocytosis. In some embodiments, a transferrin receptor may be of human (NCBI Gene ID 7037), non-human primate (e.g., NCBI Gene ID 711568 or NCBI Gene ID 102136007), or rodent (e.g., NCBI Gene ID 22042) origin. In addition, multiple human transcript variants have been characterized that encoded different isoforms of the receptor (e.g., as annotated under GenBank RefSeq Accession Numbers: NP_001121620.1. NP_003225.2. NP_001300894.1, and NP_001300895.1).

[0058] 2′-modified nucleoside: As used herein, the terms “2′-modified nucleoside” and “2′-modified ribonucleoside” are used interchangeably and refer to a nucleoside having a sugar moiety modified at the 2′ position. In some embodiments, the 2′-modified nucleoside is a 2′-4′ bicyclic nucleoside, where the 2′ and 4′ positions of the sugar are bridged (e.g., via a methylene, an ethylene, or a (S)-constrained ethyl bridge). In some embodiments, the 2′-modified nucleoside is a non-bicyclic 2′-modified nucleoside, e.g., where the 2′ position of the sugar moiety is substituted. Non-limiting examples of 2′-modified nucleosides include: 2′-deoxy, 2′-fluoro (2′-F), 2′-O-methyl (2′-O-Me), 2′-O-methoxyethyl (2′-MOE), 2′-O-aminopropyl (2′-O-AP), 2′-O-dimethylaminoethyl (2′-O-DMAOE), 2′-O-dimethylaminopropyl (2′-O-DMAP), 2′-O-dimethylaminoethyloxyethyl (2′-O-DMAEOE), 2′-O—N-methylacetamido (2′-O-NMA), locked nucleic acid (LNA, methylene-bridged nucleic acid), ethylene-bridged nucleic acid (ENA), and (S)-constrained ethyl-bridged nucleic acid (cEt). In some embodiments, the 2′-modified nucleosides described herein are high-affinity modified nucleosides and oligonucleotides comprising the 2′-modified nucleosides have increased affinity to a target sequence, relative to an unmodified oligonucleotide. Examples of structures of 2′-modified nucleosides are provided below:

[chemical structure]

[chemical structure]

[0059] These examples are shown with phosphate groups, but any internucleoside linkages are contemplated between 2′-modified nucleosides.

### II. Complexes

[0060] Provided herein are complexes that comprise a targeting agent, e.g., an antibody, covalently linked to a molecular payload. In some embodiments, a complex comprises a muscle-targeting antibody covalently linked to an oligonucleotide. A complex may comprise an antibody that specifically binds a single antigenic site or that binds to at least two antigenic sites that may exist on the same or different antigens.

[0061] A complex may be used to modulate the activity or function of at least one gene, protein, and/or (e.g., and) nucleic acid. In some embodiments, the molecular payload present with a complex is responsible for the modulation of a gene, protein, and/or (e.g., and) nucleic acids. A molecular payload may be a small molecule, protein, nucleic acid, oligonucleotide, or any molecular entity capable of modulating the activity or function of a gene, protein, and/or (e.g., and) nucleic acid in a cell. In some embodiments, a molecular payload is an oligonucleotide that targets GYS1 in muscle cells.

[0062] In some embodiments, a complex comprises a muscle-targeting agent, e.g., an anti-transferrin receptor 1 (TfR1) antibody, covalently linked to a molecular payload, e.g., an siRNA oligonucleotide that targets GYS1.

### A. Muscle-Targeting Agents

[0063] Some aspects of the disclosure provide muscle-targeting agents, e.g., for delivering a molecular payload to a muscle cell. In some embodiments, such muscle-targeting agents are capable of binding to a muscle cell, e.g., via specifically binding to an antigen on the muscle cell, and delivering an associated molecular payload to the muscle cell. In some embodiments, the molecular payload is bound (e.g., covalently bound) to the muscle targeting agent and is internalized into the muscle cell upon binding of the muscle targeting agent to an antigen on the muscle cell, e.g., via endocytosis. It should be appreciated that various types of muscle-targeting agents may be used in accordance with the disclosure, and that any muscle targets (e.g., muscle surface proteins) can be targeted by any type of muscle target agents described herein. For example, the muscle-targeting agent may comprise, or consist of, a small molecule, a nucleic acid (e.g., DNA or RNA), a peptide (e.g., an antibody), a lipid (e.g., a microvesicle), or a sugar moiety (e.g., a polysaccharide). Exemplary muscle-targeting agents are described in further detail herein, however, it should be appreciated that the exemplary muscle-targeting agents provided herein are not meant to be limiting.

[0064] Some aspects of the disclosure provide muscle-targeting agents that specifically bind to an antigen on muscle, such as skeletal muscle, smooth muscle, or cardiac muscle. In some embodiments, any of the muscle-targeting agents provided herein bind to (e.g., specifically bind to) an antigen on a skeletal muscle cell, a smooth muscle cell, and/or (e.g., and) a cardiac muscle cell.

[0065] By interacting with muscle-specific cell surface recognition elements (e.g., cell membrane proteins), both tissue localization and selective uptake into muscle cells can be achieved. In some embodiments, molecules that are substrates for muscle uptake transporters are useful for delivering a molecular payload into muscle tissue. Binding to muscle surface recognition elements followed by endocytosis can allow even large molecules such as antibodies to enter muscle cells. As another example molecular payloads conjugated to transferrin or anti-TfR1 antibodies can be taken up by muscle cells via binding to transferrin receptor, which may then be endocytosed, e.g., via clathrin-mediated endocytosis.

[0066] The use of muscle-targeting agents may be useful for concentrating a molecular payload (e.g., oligonucleotide) in muscle while reducing toxicity associated with effects in other tissues. In some embodiments, the muscle-targeting agent concentrates a bound molecular payload in muscle cells as compared to another cell type within a subject. In some embodiments, the muscle-targeting agent concentrates a bound molecular payload in muscle cells (e.g., skeletal, smooth, or cardiac muscle cells) in an amount that is at least 1, 2, 3, 4, 5, 6, 7, 8, 9, 10, 15, 20, 30, 40, 50, 60, 70, 80, 90, or 100 times greater than an amount in non-muscle cells (e.g., liver, neuronal, blood, or fat cells). In some embodiments, a toxicity of the molecular payload in a subject is reduced by at least 1%, 2%, 3%, 4%, 5%, 10%, 15%, 20%, 25%, 30%, 35%, 40%, 45%, 50%, 55%, 60%, 65%, 70%, 75%, 80%, 90%, or 95% when it is delivered to the subject when bound to the muscle-targeting agent.

[0067] In some embodiments, to achieve muscle selectivity, a muscle recognition element (e.g., a muscle cell antigen) may be required. As one example, a muscle-targeting agent may be a small molecule that is a substrate for a muscle-specific uptake transporter. As another example, a muscle-targeting agent may be an antibody that enters a muscle cell via transporter-mediated endocytosis. As another example, a muscle targeting agent may be a ligand that binds to cell surface receptor on a muscle cell. It should be appreciated that while transporter-based approaches provide a direct path for cellular entry, receptor-based targeting may involve stimulated endocytosis to reach the desired site of action.

i. Muscle-Targeting Antibodies

[0068] In some embodiments, the muscle-targeting agent is an antibody. Generally, the high specificity of antibodies for their target antigen provides the potential for selectively targeting muscle cells (e.g., skeletal, smooth, and/or (e.g., and) cardiac muscle cells). This specificity may also limit off-target toxicity. Examples of antibodies that are capable of targeting a surface antigen of muscle cells have been reported and are within the scope of the disclosure. For example, antibodies that target the surface of muscle cells are described in Arahata K., et al. “Immunostaining of skeletal and cardiac muscle surface membrane with antibody against Duchenne muscular dystrophy peptide” Nature 1988; 333: 861-3; Song K. S., et al. “Expression of caveolin-3 in skeletal, cardiac, and smooth muscle cells. Caveolin-3 is a component of the sarcolemma and co-fractionates with dystrophin and dystrophin-associated glycoproteins” J Biol Chem 1996; 271: 15160-5; and Weisbart R. H. et al., “Cell type specific targeted intracellular delivery into muscle of a monoclonal antibody that binds myosin IIb” Mol Immunol. 2003 March, 39(13):783-9; the entire contents of each of which are incorporated herein by reference.

a. Anti-Transferrin Receptor (TfR) Antibodies

[0069] Some aspects of the disclosure are based on the recognition that agents binding to transferrin receptor, e.g., anti-transferrin-receptor antibodies, are capable of targeting muscle cell. Transferrin receptors are internalizing cell surface receptors that transport transferrin across the cellular membrane and participate in the regulation and homeostasis of intracellular iron levels. Some aspects of the disclosure provide transferrin receptor binding proteins, which are capable of binding to transferrin receptor. Accordingly, aspects of the disclosure provide binding proteins (e.g., antibodies) that bind to transferrin receptor. In some embodiments, binding proteins that bind to transferrin receptor are internalized, along with any bound molecular payload, into a muscle cell. As used herein, an antibody that binds to a transferrin receptor may be referred to interchangeably as a transferrin receptor antibody, an anti-transferrin receptor antibody, or an anti-TfR1 antibody. Antibodies that bind, e.g., specifically bind, to a transferrin receptor may be internalized into the cell, e.g., through receptor-mediated endocytosis, upon binding to a transferrin receptor.

[0070] It should be appreciated that anti-TfR1 antibodies may be produced, synthesized, and/or (e.g., and) derivatized using several known methodologies, e.g., library design using phage display. Exemplary methodologies have been characterized in the art and are incorporated by reference (Díez, P. et al. “High-throughput phage-display screening in array format”, Enzyme and Microb Technol, 2015, 79, 34-41; Hammers C. M. and Stanley, J. R., “Antibody Phage Display: Technique and Applications” J Invest Dermatol. 2014, 134:2; Engleman, Edgar (Ed.) “Human Hybridomas and Monoclonal Antibodies.” 1985, Springer). In other embodiments, an anti-TfR1 antibody has been previously characterized or disclosed. Antibodies that specifically bind to transferrin receptor are known in the art (see, e.g., U.S. Pat. No. 4,364,934, filed Dec. 4, 1979, “Monoclonal antibody to a human early thymocyte antigen and methods for preparing same”; U.S. Pat. No. 8,409,573, filed Jun. 14, 2006, “Anti-CD71 monoclonal antibodies and uses thereof for treating malignant tumor cells”; U.S. Pat. No. 9,708,406, filed May 20, 2014, “Anti-transferrin receptor antibodies and methods of use”; U.S. Pat. No. 9,611,323, filed Dec. 19, 2014, “Low affinity blood brain barrier receptor antibodies and uses therefor”; WO 2015/098989, filed Dec. 24, 2014, “Novel anti-transferrin receptor antibody that passes through blood-brain barrier”; Schneider C. et al. “Structural features of the cell surface receptor for transferrin that is recognized by the monoclonal antibody OKT9.” J Biol Chem. 1982, 257:14, 8516-8522; Lee et al. “Targeting Rat Anti-Mouse Transferrin Receptor Monoclonal Antibodies through Blood-Brain Barrier in Mouse” 2000, J Pharmacol. Exp. Ther., 292: 1048-52).

[0071] In some embodiments, the anti-TfR1 antibody described herein binds to transferrin receptor with high specificity and affinity. In some embodiments, the anti-TfR1 antibody described herein specifically binds to any extracellular epitope of a transferrin receptor or an epitope that becomes exposed to an antibody. In some embodiments, anti-TfR1 antibodies provided herein bind specifically to transferrin receptor from human, non-human primates, mouse, rat, etc. In some embodiments, anti-TfR1 antibodies provided herein bind to human transferrin receptor. In some embodiments, the anti-TfR1 antibody described herein binds to an amino acid segment of a human or non-human primate transferrin receptor, as provided in SEQ ID NOs: 105-108. In some embodiments, the anti-TfR1 antibody described herein binds to an amino acid segment corresponding to amino acids 90-96 of a human transferrin receptor as set forth in SEQ ID NO: 105, which is not in the apical domain of the transferrin receptor.

[0072] An example human transferrin receptor amino acid sequence, corresponding to NCBI sequence NP_003225.2 (transferrin receptor protein 1 isoform 1, Homo sapiens) is as follows:

(SEQ ID NO: 105)
MMDQARSAFSNLFGGEPLSYTRFSLARQVDGDNSHVEMKLAVDEEENAD
NNTKANVTKPKRCSGSICYGTIAVIVFFLIGFMIGYLGYCKGVEPKTEC
ERLAGTESPVREEPGEDFPAARRLYWDDLKRKLSEKLDSTDFTGTIKLL
NENSYVPREAGSQKDENLALYVENQFREFKLSKVWRDQHFVKIQVKDSA
QNSVIIVDKNGRLVYLVENPGGYVAYSKAATVTGKLVHANFGTKKDFED
LYTPVNGSIVIVRAGKITFAEKVANAESLNAIGVLIYMDQTKFPIVNAE
LSFFGHAHLGTGDPYTPGFPSFNHTQFPPSRSSGLPNIPVQTISRAAAE
KLFGNMEGDCPSDWKTDSTCRMVTSESKNVKLTVSNVLKEIKILNIFGV
IKGFVEPDHYVVVGAQRDAWGPGAAKSGVGTALLLKLAQMFSDMVLKDG
FQPSRSIIFASWSAGDFGSVGATEWLEGYLSSLHLKAFTYINLDKAVLG
TSNFKVSASPLLYTLIEKTMQNVKHPVTGQFLYQDSNWASKVEKLTLDN
AAFPFLAYSGIPAVSFCFCEDTDYPYLGTTMDTYKELIERIPELNKVAR
AAAEVAGQFVIKLTHDVELNLDYERYNSQLLSFVRDLNQYRADIKEMGL
SLQWLYSARGDFFRATSRLTTDFGNAEKTDRFVMKKLNDRVMRVEYHFL
SPYVSPKESPFRHVFWGSGSHTLPALLENLKLRKQNNGAFNETLFRNQL
ALATWTIQGAANALSGDVWDIDNEF.

[0073] An example non-human primate transferrin receptor amino acid sequence, corresponding to NCBI sequence NP_001244232.1 (transferrin receptor protein 1, Macaca mulatta) is as follows:

(SEQ ID NO: 106)
MMDQARSAFSNLFGGEPLSYTRFSLARQVDGDNSHVEMKLGVDEEENTD
NNTKPNGTKPKRCGGNICYGTIAVIIFFLIGFMIGYLGYCKGVEPKTEC
ERLAGTESPAREEPEEDFPAAPRLYWDDLKRKLSEKLDTTDFTSTIKLL
NENLYVPREAGSQKDENLALYIENQFREFKLSKVWRDQHFVKIQVKDSA
QNSVIIVDKNGGLVYLVENPGGYVAYSKAATVTGKLVHANFGTKKDFED
LDSPVNGSIVIVRAGKITFAEKVANAESLNAIGVLIYMDQTKFPIVKAD
LSFFGHAHLGTGDPYTPGFPSFNHTQFPPSQSSGLPNIPVQTISRAAAE
KLFGNMEGDCPSDWKTDSTCKMVTSENKSVKLTVSNVLKETKILNIFGV
IKGFVEPDHYVVVGAQRDAWGPGAAKSSVGTALLLKLAQMFSDMVLKDG
FQPSRSIIFASWSAGDFGSVGATEWLEGYLSSLHLKAFTYINLDKAVLG
AAAEVAGQFVIKLTHDTELNLDYERYNSQLLLFLRDLNQYRADVKEMGL
STSNFKVSASPLLYTLIEKTMQDVKHPVTGRSLYQDSNWASKVEKLTLD
NAAFPFLAYSGIPAVSFCFCEDTDYPYLGTTMDTYKELVERIPELNKVA
RLQWLYSARGDFFRATSRLTTDFRNAEKRDKFVMKKLNDRVMRVEYYFL
SPYVSPKESPFRHVFWGSGSHTLSALLESLKLRRQNNSAFNETLFRNQL
ALATWTIQGAANALSGDVWDIDNEF

[0074] An example non-human primate transferrin receptor amino acid sequence, corresponding to NCBI sequence XP_005545315.1 (transferrin receptor protein 1, Macaca fascicularis) is as follows:

(SEQ ID NO: 107)
MMDQARSAFSNLFGGEPLSYTRFSLARQVDGDNSHVEMKLGVDEEENTD
NNTKANGTKPKRCGGNICYGTIAVIIFFLIGFMIGYLGYCKGVEPKTEC
ERLAGTESPAREEPEEDFPAAPRLYWDDLKRKLSEKLDTTDFTSTIKLL
NENLYVPREAGSQKDENLALYIENQFREFKLSKVWRDQHFVKIQVKDSA
QNSVIIVDKNGGLVYLVENPGGYVAYSKAATVTGKLVHANFGTKKDFED
LDSPVNGSIVIVRAGKITFAEKVANAESLNAIGVLIYMDQTKFPIVKAD
LSFFGHAHLGTGDPYTPGFPSFNHTQFPPSQSSGLPNIPVQTISRAAAE
KLFGNMEGDCPSDWKTDSTCKMVTSENKSVKLTVSNVLKETKILNIFGV
IKGFVEPDHYVVVGAQRDAWGPGAAKSSVGTALLLKLAQMFSDMVLKDG
FQPSRSIIFASWSAGDFGSVGATEWLEGYLSSLHLKAFTYINLDKAVLG
TSNFKVSASPLLYTLIEKTMQDVKHPVTGRSLYQDSNWASKVEKLTLDN
AAFPFLAYSGIPAVSFCFCEDTDYPYLGTTMDTYKELVERIPELNKVAR
AAAEVAGQFVIKLTHDTELNLDYERYNSQLLLFLRDLNQYRADVKEMGL
SLQWLYSARGDFFRATSRLTTDFRNAEKRDKFVMKKLNDRVMRVEYYFL
SPYVSPKESPFRHVFWGSGSHTLSALLESLKLRRQNNSAFNETLFRNQL
ALATWTIQGAANALSGDVWDIDNEF.

[0075] An example mouse transferrin receptor amino acid sequence, corresponding to NCBI sequence NP_001344227.1 (transferrin receptor protein 1, Mus musculus) is as follows:

(SEQ ID NO: 108)
MMDQARSAFSNLFGGEPLSYTRFSLARQVDGDNSHVEMKLAADEEENAD
NNMKASVRKPKRFNGRLCFAAIALVIFFLIGFMSGYLGYCKRVEQKEEC
VKLAETEETDKSETMETEDVPTSSRLYWADLKTLLSEKLNSIEFADTIK
QLSQNTYTPREAGSQKDESLAYYIENQFHEFKFSKVWRDEHYVKIQVKS
SIGQNMVTIVQSNGNLDPVESPEGYVAFSKPTEVSGKLVHANFGTKKDF
EELSYSVNGSLVIVRAGEITFAEKVANAQSFNAIGVLIYMDKNKFPVVE
ADLALFGHAHLGTGDPYTPGFPSFNHTQFPPSQSSGLPNIPVQTISRAA
AEKLFGKMEGSCPARWNIDSSCKLELSQNQNVKLIVKNVLKERRILNIF
GVIKGYEEPDRYVVVGAQRDALGAGVAAKSSVGTGLLLKLAQVFSDMIS
KDGFRPSRSIIFASWTAGDFGAVGATEWLEGYLSSLHLKAFTYINLDKV
VLGTSNFKVSASPLLYTLMGKIMQDVKHPVDGKSLYRDSNWISKVEKLS
FDNAAYPFLAYSGIPAVSFCFCEDADYPYLGTRLDTYEALTQKVPQLNQ
MVRTAAEVAGQLIIKLTHDVELNLDYEMYNSKLLSFMKDLNQFKTDIRD
MGLSLQWLYSARGDYFRATSRLTTDFHNAEKTNRFVMREINDRIMKVEY
HFLSPYVSPRESPFRHIFWGSGSHTLSALVENLKLRQKNITAFNETLFR
NQLALATWTIQGVANALSGDIWNIDNEF

[0076] In some embodiments, an anti-TfR1 antibody binds to an amino acid segment of the receptor as follows:

FVKIQVKDSAQNSVIIVDKNGRLVYLVENPGGYVAYSKAATVTGKLVHANFGTKKDFE DLYTPVNGSIVIVRAGKITFAEKVANAESLNAIGVLIYMDQTKFPIVNAELSFFGHAHLG TGDPYTPGFPSFNHTQFPPSRSSGLPNIPVQTISRAAAEKLFGNMEGDCPSDWKTDSTCR MVTSESKNVKLTVSNVLKE (SEQ ID NO: 109) and does not inhibit the binding interactions between transferrin receptors and transferrin and/or (e.g., and) human hemochromatosis protein (also known as HFE). In some embodiments, the anti-TfR1 antibody described herein does not bind an epitope in SEQ ID NO: 109.

[0077] Appropriate methodologies may be used to obtain and/or (e.g., and) produce antibodies, antibody fragments, or antigen-binding agents, e.g., through the use of recombinant DNA protocols. In some embodiments, an antibody may also be produced through the generation of hybridomas (see, e.g., Kohler, G and Milstein, C. “Continuous cultures of fused cells secreting antibody of predefined specificity” Nature, 1975, 256: 495-497). The antigen-of-interest may be used as the immunogen in any form or entity, e.g., recombinant or a naturally occurring form or entity. Hybridomas are screened using standard methods, e.g., ELISA screening, to find at least one hybridoma that produces an antibody that targets a particular antigen. Antibodies may also be produced through screening of protein expression libraries that express antibodies, e.g., phage display libraries. Phage display library design may also be used, in some embodiments, (see, e.g. U.S. Pat. No. 5,223,409, filed Mar. 1, 1991, “Directed evolution of novel binding proteins”; WO 1992/18619, filed Apr. 10, 1992, “Heterodimeric receptor libraries using phagemids”; WO 1991/17271, filed May 1, 1991, “Recombinant library screening methods”; WO 1992/20791, filed May 15, 1992, “Methods for producing members of specific binding pairs”; WO 1992/15679, filed Feb. 28, 1992, and “Improved epitope displaying phage”). In some embodiments, an antigen-of-interest may be used to immunize a non-human animal, e.g., a rodent or a goat. In some embodiments, an antibody is then obtained from the non-human animal and may be optionally modified using a number of methodologies, e.g., using recombinant DNA techniques. Additional examples of antibody production and methodologies are known in the art (see, e.g., Harlow et al. “Antibodies: A Laboratory Manual”, Cold Spring Harbor Laboratory, 1988).

[0078] In some embodiments, an antibody is modified, e.g., modified via glycosylation, phosphorylation, sumoylation, and/or (e.g., and) methylation. In some embodiments, an antibody is a glycosylated antibody, which is conjugated to one or more sugar or carbohydrate molecules. In some embodiments, the one or more sugar or carbohydrate molecule are conjugated to the antibody via N-glycosylation, O-glycosylation, C-glycosylation, glypiation (GPI anchor attachment), and/or (e.g., and) phosphoglycosylation. In some embodiments, the one or more sugar or carbohydrate molecules are monosaccharides, disaccharides, oligosaccharides, or glycans. In some embodiments, the one or more sugar or carbohydrate molecule is a branched oligosaccharide or a branched glycan. In some embodiments, the one or more sugar or carbohydrate molecule includes a mannose unit, a glucose unit, an N-acetylglucosamine unit, an N-acetylgalactosamine unit, a galactose unit, a fucose unit, or a phospholipid unit. In some embodiments, there are about 1-10, about 1-5, about 5-10, about 1-4, about 1-3, or about 2 sugar molecules. In some embodiments, a glycosylated antibody is fully or partially glycosylated. In some embodiments, an antibody is glycosylated by chemical reactions or by enzymatic means. In some embodiments, an antibody is glycosylated in vitro or inside a cell, which may optionally be deficient in an enzyme in the N- or O-glycosylation pathway, e.g., a glycosyltransferase. In some embodiments, an antibody is functionalized with sugar or carbohydrate molecules as described in International Patent Application Publication WO2014065661, published on May 1, 2014, entitled, “Modified antibody, antibody-conjugate and process for the preparation thereof”.

[0079] In some embodiments, the anti-TfR1 antibody of the present disclosure comprises a VL domain and/or (e.g., and) a VH domain of any one of the anti-TfR1 antibodies selected from any one of Tables 2-7, and comprises a constant region comprising the amino acid sequences of the constant regions of an IgG, IgE, IgM, IgD, IgA or IgY immunoglobulin molecule, any class (e.g., IgG1, IgG2, IgG3, IgG4, IgA1 and IgA2), or any subclass (e.g., IgG2a and IgG2b) of immunoglobulin molecule. Non-limiting examples of human constant regions are described in the art, e.g., see Kabat E A et al., (1991) supra.

[0080] In some embodiments, agents binding to transferrin receptor, e.g., anti-TfR1 antibodies, are capable of targeting muscle cell and/or (e.g., and) mediate the transportation of an agent across the blood brain barrier. Transferrin receptors are internalizing cell surface receptors that transport transferrin across the cellular membrane and participate in the regulation and homeostasis of intracellular iron levels. Some aspects of the disclosure provide transferrin receptor binding proteins, which are capable of binding to transferrin receptor. Antibodies that bind, e.g., specifically bind, to a transferrin receptor may be internalized into the cell, e.g., through receptor-mediated endocytosis, upon binding to a transferrin receptor.

[0081] Provided herein, in some aspects, are humanized antibodies that bind to transferrin receptor with high specificity and affinity. In some embodiments, the humanized anti-TfR1 antibody described herein specifically binds to any extracellular epitope of a transferrin receptor or an epitope that becomes exposed to an antibody. In some embodiments, the humanized anti-TfR1 antibodies provided herein bind specifically to transferrin receptor from human, non-human primates, mouse, rat, etc. In some embodiments, the humanized anti-TfR1 antibodies provided herein bind to human transferrin receptor. In some embodiments, the humanized anti-TfR1 antibody described herein binds to an amino acid segment of a human or non-human primate transferrin receptor, as provided in SEQ ID NOs: 105-108. In some embodiments, the humanized anti-TfR1 antibody described herein binds to an amino acid segment corresponding to amino acids 90-96 of a human transferrin receptor as set forth in SEQ ID NO: 105, which is not in the apical domain of the transferrin receptor. In some embodiments, the humanized anti-TfR1 antibodies described herein binds to TfR1 but does not bind to TfR2.

[0082] In some embodiments, the anti-TfR1 antibodies described herein (e.g., Anti-TfR1 clone 8 in Table 2 below) bind an epitope in TfR1, wherein the epitope comprises residues in amino acids 214-241 and/or amino acids 354-381 of SEQ ID NO: 105. In some embodiments, the anti-TfR1 antibodies described herein bind an epitope comprising residues in amino acids 214-241 and amino acids 354-381 of SEQ ID NO: 105. In some embodiments, the anti-TfR1 antibodies described herein bind an epitope comprising one or more of residues Y222, T227, K231, H234, T367, S368, S370, T376, and S378 of human TfR1 as set forth in SEQ ID NO: 105. In some embodiments, the anti-TfR1 antibodies described herein bind an epitope comprising residues Y222, T227, K231, H234, T367, S368, S370, T376, and S378 of human TfR1 as set forth in SEQ ID NO: 105.

[0083] In some embodiments, the anti-TfR1 antibody described herein (e.g., 3M12 in Table 2 below and its humanized variants) bind an epitope in TfR1, wherein the epitope comprises residues in amino acids 258-291 and/or amino acids 358-381 of SEQ ID NO: 105. In some embodiments, the anti-TfR1 antibodies (e.g., 3M12 in Table 2 below and its humanized variants) described herein bind an epitope comprising residues in amino acids amino acids 258-291 and amino acids 358-381 of SEQ ID NO: 105. In some embodiments, the anti-TfR1 antibodies described herein (e.g., 3M12 in Table 2 below and its humanized variants) bind an epitope comprising one or more of residues K261, S273, Y282, T362, S368, S370, and K371 of human TfR1 as set forth in SEQ ID NO: 105. In some embodiments, the anti-TfR1 antibodies described herein (e.g., 3M12 in Table 2 below and its humanized variants) bind an epitope comprising residues K261, S273, Y282, T362, S368, S370, and K371 of human TfR1 as set forth in SEQ ID NO: 105.

[0084] In some embodiments, an anti-TfR1 antibody specifically binds a TfR1 (e.g., a human or non-human primate TfR1) with binding affinity (e.g., as indicated by Kd) of at least about 10⁻⁴ M, 10⁻⁵ M, 10⁻⁶ M, 10⁻⁷ M, 10⁻⁸ M, 10⁻⁹ M, 10⁻¹⁰ M, 10⁻¹¹ M, 10⁻¹² M, 10⁻¹³ M, or less. In some embodiments, the anti-TfR1 antibodies described herein bind to TfR1 with a KD of sub-nanomolar range. In some embodiments, the anti-TfR1 antibodies described herein selectively bind to transferrin receptor 1 (TfR1) but do not bind to transferrin receptor 2 (TfR2). In some embodiments, the anti-TfR1 antibodies described herein bind to human TfR1 and cyno TfR1 (e.g., with a Kd of 10⁻⁷ M, 10⁻⁸ M, 10⁻⁹ M, 10⁻¹⁰ M, 10⁻¹¹ M, 10⁻¹² M, 10⁻¹³ M, or less), but do not bind to a mouse TfR1. The affinity and binding kinetics of the anti-TfR1 antibody can be tested using any suitable method including but not limited to biosensor technology (e.g., OCTET or BIACORE). In some embodiments, binding of any one of the anti-TfR1 antibodies described herein does not complete with or inhibit transferrin binding to the TfR1. In some embodiments, binding of any one of the anti-TfR1 antibodies described herein does not complete with or inhibit HFE-beta-2-microglobulin binding to the TfR1.

[0085] Non-limiting examples of anti-TfR1 antibodies are provided in Table 2.

TABLE 2
Examples of Anti-TfR1 Antibodies

| | No. | | | |
|---|---|---|---|---|
| Ab | system | IMGT | Kabat | Chothia |
| 3-A4 | CDR- | GFNIKDDY | DDYMY (SEQ ID NO: 7) | GFNIKDD (SEQ ID NO: 12) |
| | H1 | (SEQ ID NO: 1) | | |
| | CDR- | IDPENGDT | WIDPENGDTEYASKFQD | ENG (SEQ ID NO: 13) |
| | H2 | (SEQ ID NO: 2) | (SEQ ID NO: 8) | |
| | CDR- | TLWLRRGLDY (SEQ ID | WLRRGLDY (SEQ ID NO: 9) | LRRGLD (SEQ ID NO: 14) |
| | H3 | NO: 3) | | |
| | CDR- | KSLLHSNGYTY (SEQ ID | RSSKSLLHSNGYTYLF (SEQ | SKSLLHSNGYTY (SEQ ID |
| | L1 | NO: 4) | ID NO: 10) | NO: 15) |
| | CDR- | RMS (SEQ ID NO: 5) | RMSNLAS (SEQ ID NO: 11) | RMS (SEQ ID NO: 5) |
| | L2 | | | |
| | CDR- | MQHLEYPFT (SEQ ID | MQHLEYPFT (SEQ ID NO: 6) | HLEYPF (SEQ ID NO: 16) |
| | L3 | NO: 6) | | |
| | VH | EVQLQQSGAELVRPGASVKLSCTASGFNIKDDYMYWVKQRPEQGLEWIGWIDPENGDT | | |
| | | EYASKFQDKATVTADTSSNTAYLQLSSLTSEDTAVYYCTLWLRRGLDYWGQGTSVTVS | | |
| | | S (SEQ ID NO: 17) | | |
| | VL | DIVMTQAAPSVPVTPGESVSISCRSSKSLLHSNGYTYLFWFLQRPGQSPQLLIYRMSNLA | | |
| | | SGVPDRFSGSGSGTAFTLRISRVEAEDVGVYYCMQHLEYPFTFGGGTKLEIK (SEQ ID | | |
| | | NO: 18) | | |
| 3-A4 | CDR- | GFNIKDDY (SEQ ID NO: | DDYMY (SEQ ID NO: 7) | GFNIKDD (SEQ ID NO: 12) |
| N54T* | H1 | 1) | | |
| | CDR- | IDPETGDT (SEQ ID NO: | WIDPETGDTEYASKFQD | ETG (SEQ ID NO: 21) |
| | H2 | 19) | (SEQ ID NO: 20) | |
| | CDR- | TLWLRRGLDY (SEQ ID | WLRRGLDY (SEQ ID NO: 9) | LRRGLD (SEQ ID NO: 14) |
| | H3 | NO: 3) | | |
| | CDR- | KSLLHSNGYTY (SEQ ID | RSSKSLLHSNGYTYLF (SEQ | SKSLLHSNGYTY (SEQ ID |
| | L1 | NO: 4) | ID NO: 10) | NO: 15) |
| | CDR- | RMS (SEQ ID NO: 5) | RMSNLAS (SEQ ID NO: 11) | RMS (SEQ ID NO: 5) |
| | L2 | | | |
| | CDR- | MQHLEYPFT (SEQ ID | MQHLEYPFT (SEQ ID NO: 6) | HLEYPF (SEQ ID NO: 16) |
| | L3 | NO: 6) | | |
| | VH | EVQLQQSGAELVRPGASVKLSCTASGFNIKDDYMYWVKQRPEQGLEWIGWIDPETGDT | | |
| | | EYASKFQDKATVTADTSSNTAYLQLSSLTSEDTAVYYCTLWLRRGLDYWGQGTSVTVS | | |
| | | S (SEQ ID NO: 22) | | |
| | VL | DIVMTQAAPSVPVTPGESVSISCRSSKSLLHSNGYTYLFWFLQRPGQSPQLLIYRMSNLA | | |
| | | SGVPDRFSGSGSGTAFTLRISRVEAEDVGVYYCMQHLEYPFTFGGGTKLEIK (SEQ ID | | |
| | | NO: 18) | | |
| 3-A4 | CDR- | GFNIKDDY (SEQ ID NO: | DDYMY (SEQ ID NO: 7) | GFNIKDD (SEQ ID NO: 12) |
| N54S* | H1 | 1) | | |
| | CDR- | IDPESGDT (SEQ ID NO: | WIDPESGDTEYASKFQD | ESG (SEQ ID NO: 25) |
| | H2 | 23) | (SEQ ID NO: 24) | |
| | CDR- | TLWLRRGLDY (SEQ ID | WLRRGLDY (SEQ ID NO: 9) | LRRGLD (SEQ ID NO: 14) |
| | H3 | NO: 3) | | |
| | CDR- | KSLLHSNGYTY (SEQ ID | RSSKSLLHSNGYTYLF (SEQ | SKSLLHSNGYTY (SEQ ID |
| | L1 | NO: 4) | ID NO: 10) | NO: 15) |
| | CDR- | RMS (SEQ ID NO: 5) | RMSNLAS (SEQ ID NO: 11) | RMS (SEQ ID NO: 5) |
| | L2 | | | |
| | CDR- | MQHLEYPFT (SEQ ID | MQHLEYPFT (SEQ ID NO: 6) | HLEYPF (SEQ ID NO: 16) |
| | L3 | NO: 6) | | |
| | VH | EVQLQQSGAELVRPGASVKLSCTASGFNIKDDYMYWVKQRPEQGLEWIGWIDPESGDT | | |
| | | EYASKFQDKATVTADTSSNTAYLQLSSLTSEDTAVYYCTLWLRRGLDYWGQGTSVTVS | | |
| | | S (SEQ ID NO: 26) | | |
| | VL | DIVMTQAAPSVPVTPGESVSISCRSSKSLLHSNGYTYLFWFLQRPGQSPQLLIYRMSNLA | | |
| | | SGVPDRFSGSGSGTAFTLRISRVEAEDVGVYYCMQHLEYPFTFGGGTKLEIK (SEQ ID | | |
| | | NO: 18) | | |
| 3-M12 | CDR- | GYSITSGYY (SEQ ID | SGYYWN (SEQ ID NO: 33) | GYSITSGY (SEQ ID NO: |
| | H1 | NO: 27) | | 38) |
| | CDR- | ITFDGAN (SEQ ID NO: | YITFDGANNYNPSLKN (SEQ | FDG (SEQ ID NO: 39) |
| | H2 | 28) | ID NO: 34) | |
| | CDR- | TRSSYDYDVLDY (SEQ | SSYDYDVLDY (SEQ ID NO: | SYDYDVLD (SEQ ID NO: |
| | H3 | ID NO: 29) | 35) | 40) |
| | CDR- | QDISNF (SEQ ID NO: 30) | RASQDISNFLN (SEQ ID NO: | SQDISNF (SEQ ID NO: 41) |
| | L1 | | 36) | |
| | CDR- | YTS (SEQ ID NO: 31) | YTSRLHS (SEQ ID NO: 37) | YTS (SEQ ID NO: 31) |
| | L2 | | | |
| | CDR- | QQGHTLPYT (SEQ ID | QQGHTLPYT (SEQ ID NO: 32) | GHTLPY (SEQ ID NO: 42) |
| | L3 | NO: 32) | | |
| | VH | DVQLQESGPGLVKPSQSLSLTCSVTGYSITSGYYWNWIRQFPGNKLEWMGYITFDGAN | | |
| | | NYNPSLKNRISITRDTSKNQFFLKLTSVTTEDTATYYCTRSSYDYDVLDYWGQGTTLTV | | |
| | | SS (SEQ ID NO: 43) | | |
| | VL | DIQMTQTTSSLSASLGDRVTISCRASQDISNFLNWYQQRPDGTVKLLIYYTSRLHSGVPS | | |
| | | RFSGSGSGTDFSLTVSNLEQEDIATYFCQQGHTLPYTFGGGTKLEIK (SEQ ID NO: 44) | | |
| 5-H12 | CDR- | GYSFTDYC (SEQ ID NO: | DYCIN (SEQ ID NO: 51) | GYSFTDY (SEQ ID NO: 56) |
| | H1 | 45) | | |
| | CDR- | IYPGSGNT (SEQ ID NO: | WIYPGSGNTRYSERFKG | GSG (SEQ ID NO: 57) |
| | H2 | 46) | (SEQ ID NO: 52) | |
| | CDR- | AREDYYPYHGMDY | EDYYPYHGMDY (SEQ ID | DYYPYHGMD (SEQ ID |
| | H3 | (SEQ ID NO: 47) | NO: 53) | NO: 58) |
| | CDR- | ESVDGYDNSF (SEQ ID | RASESVDGYDNSFMH (SEQ | SESVDGYDNSF (SEQ ID |
| | L1 | NO: 48) | ID NO: 54) | NO: 59) |
| | CDR- | RAS (SEQ ID NO: 49) | RASNLES (SEQ ID NO: 55) | RAS (SEQ ID NO: 49) |
| | L2 | | | |
| | CDR- | QQSSEDPWT (SEQ ID | QQSSEDPWT (SEQ ID NO: 50) | SSEDPW (SEQ ID NO: 60) |
| | L3 | NO: 50) | | |
| | VH | QIQLQQSGPELVRPGASVKISCKASGYSFTDYCINWVNQRPGQGLEWIGWIYPGSGNTR | | |
| | | YSERFKGKATLTVDTSSNTAYMQLSSLTSEDSAVYFCAREDYYPYHGMDYWGQGTSV | | |
| | | TVSS (SEQ ID NO: 61) | | |
| | VL | DIVLTQSPTSLAVSLGQRATISCRASESVDGYDNSFMHWYQQKPGQPPKLLIFRASNLES | | |
| | | GIPARFSGSGSRTDFTLTINPVEAADVATYYCQQSSEDPWTFGGGTKLEIK (SEQ ID NO: | | |
| | | 62) | | |
| 5-H12 | CDR- | GYSFTDYY (SEQ ID | DYYIN (SEQ ID NO: 64) | GYSFTDY (SEQ ID NO: 56) |
| C33Y* | H1 | NO: 63) | | |
| | CDR- | IYPGSGNT (SEQ ID NO: | WIYPGSGNTRYSERFKG | GSG (SEQ ID NO: 57) |
| | H2 | 46) | (SEQ ID NO: 52) | |
| | CDR- | AREDYYPYHGMDY | EDYYPYHGMDY (SEQ ID | DYYPYHGMD (SEQ ID |
| | H3 | (SEQ ID NO: 47) | NO: 53) | NO: 58) |
| | CDR- | ESVDGYDNSF (SEQ ID | RASESVDGYDNSFMH (SEQ | SESVDGYDNSF (SEQ ID |
| | L1 | NO: 48) | ID NO: 54) | NO: 59) |
| | CDR- | RAS (SEQ ID NO: 49) | RASNLES (SEQ ID NO: 55) | RAS (SEQ ID NO: 49) |
| | L2 | | | |
| | CDR- | QQSSEDPWT (SEQ ID | QQSSEDPWT (SEQ ID NO: 50) | SSEDPW (SEQ ID NO: 60) |
| | L3 | NO: 50) | | |
| | VH | QIQLQQSGPELVRPGASVKISCKASGYSFTDYYINWVNQRPGQGLEWIGWIYPGSGNTR | | |
| | | YSERFKGKATLTVDTSSNTAYMQLSSLTSEDSAVYFCAREDYYPYHGMDYWGQGTSV | | |
| | | TVSS (SEQ ID NO: 65) | | |
| | VL | DIVLTQSPTSLAVSLGQRATISCRASESVDGYDNSFMHWYQQKPGQPPKLLIFRASNLES | | |
| | | GIPARFSGSGSRTDFTLTINPVEAADVATYYCQQSSEDPWTFGGGTKLEIK (SEQ ID NO: | | |
| | | 62) | | |
| 5-H12 | CDR- | GYSFTDYD (SEQ ID | DYDIN (SEQ ID NO: 67) | GYSFTDY (SEQ ID NO: 56) |
| C33D* | H1 | NO: 66) | | |
| | CDR- | IYPGSGNT (SEQ ID NO: | WIYPGSGNTRYSERFKG | GSG (SEQ ID NO: 57) |
| | H2 | 46) | (SEQ ID NO: 52) | |
| | CDR- | AREDYYPYHGMDY | EDYYPYHGMDY (SEQ ID | DYYPYHGMD (SEQ ID |
| | H3 | (SEQ ID NO: 47) | NO: 53) | NO: 58) |
| | CDR- | ESVDGYDNSF (SEQ ID | RASESVDGYDNSFMH (SEQ | SESVDGYDNSF (SEQ ID |
| | L1 | NO: 48) | ID NO: 54) | NO: 59) |
| | CDR- | RAS (SEQ ID NO: 49) | RASNLES (SEQ ID NO: 55) | RAS (SEQ ID NO: 49) |
| | L2 | | | |
| | CDR- | QQSSEDPWT (SEQ ID | QQSSEDPWT (SEQ ID NO: 50) | SSEDPW (SEQ ID NO: 60) |
| | L3 | NO: 50) | | |
| | VH | QIQLQQSGPELVRPGASVKISCKASGYSFTDYDINWVNQRPGQGLEWIGWIYPGSGNTRY | | |
| | | SERFKGKATLTVDTSSNTAYMQLSSLTSEDSAVYFCAREDYYPYHGMDYWGQGTSVTV | | |
| | | SS (SEQ ID NO: 68) | | |
| | VL | DIVLTQSPTSLAVSLGQRATISCRASESVDGYDNSFMHWYQQKPGQPPKLLIFRASNLES | | |
| | | GIPARFSGSGSRTDFTLTINPVEAADVATYYCQQSSEDPWTFGGGTKLEIK (SEQ ID NO: | | |
| | | 62) | | |
| Anti- | CDR- | GYSFTSYW (SEQ ID | SYWIG (SEQ ID NO: 144) | GYSFTSY (SEQ ID NO: |
| TfR1 | H1 | NO: 138) | | 149) |
| clone 8 | CDR- | IYPGDSDT (SEQ ID NO: | IIYPGDSDTRYSPSFQGQ | GDS (SEQ ID NO: 150) |
| | H2 | 139) | (SEQ ID NO: 145) | |
| | CDR- | ARFPYDSSGYYSFDY | FPYDSSGYYSFDY (SEQ ID | PYDSSGYYSFD (SEQ ID |
| | H3 | (SEQ ID NO: 140) | NO: 146) | NO: 151) |
| | CDR- | QSISSY (SEQ ID NO: | RASQSISSYLN (SEQ ID NO: | SQSISSY (SEQ ID NO: 152) |
| | L1 | 141) | 147) | |
| | CDR- | AAS (SEQ ID NO: 142) | AASSLQS (SEQ ID NO: 148) | AAS (SEQ ID NO: 142) |
| | L2 | | | |
| | CDR- | QQSYSTPLT (SEQ ID | QQSYSTPLT (SEQ ID NO: | SYSTPL (SEQ ID NO: 153) |
| | L3 | NO: 143) | 143) | |

*mutation positions are according to Kabat numbering of the respective VH sequences containing the mutations

[0086] In some embodiments, the anti-TfR1 antibody of the present disclosure is a humanized variant of any one of the anti-TfR1 antibodies provided in Table 2. In some embodiments, the anti-TfR1 antibody of the present disclosure comprises a CDR-H1, a CDR-H2, a CDR-H3, a CDR-L1, a CDR-L2, and a CDR-L3 that are the same as the CDR-H1, CDR-H2, and CDR-H3 in any one of the anti-TfR1 antibodies provided in Table 2, and comprises a humanized heavy chain variable region and/or (e.g., and) a humanized light chain variable region.

[0087] Examples of amino acid sequences of anti-TfR1 antibodies described herein are provided in Table 3.

TABLE 3
Variable Regions of Anti-TfR1 Antibodies

| Antibody | Variable Region Amino Acid Sequence** |
|---|---|
| 3A4 | VH: |
| VH3 (N54T*)/Vκ4 | EVOLVQSGSELKKPGASVKVSCTASGFNIKDDYMYWVRQPPGKGLEWIGWIDP |
| | ETGDTEYASKFQDRVTVTADTSTNTAYMELSSLRSEDTAVYYCTLWLRRGLD |
| | YWGQGTLVTVSS (SEQ ID NO: 69) |
| | VL: |
| | DIVMTQSPLSLPVTPGEPASISCRSSKSLLHSNGYTYLFWFQQRPGQSPRLLIYR |
| | MSNLASGVPDRFSGSGSGTDFTLKISRVEAEDVGVYYCMQHLEYPFTFGGGTK |
| | VEIK (SEQ ID NO: 70) |
| 3A4 | VH: |
| VH3 (N54S*)/Vκ4 | EVOLVQSGSELKKPGASVKVSCTASGFNIKDDYMYWVRQPPGKGLEWIGWIDP |
| | ESGDTEYASKFQDRVTVTADTSTNTAYMELSSLRSEDTAVYYCTLWLRRGLD |
| | YWGQGTLVTVSS (SEQ ID NO: 71) |
| | VL: |
| | DIVMTQSPLSLPVTPGEPASISCRSSKSLLHSNGYTYLFWFQQRPGQSPRLLIYR |
| | MSNLASGVPDRFSGSGSGTDFTLKISRVEAEDVGVYYCMQHLEYPFTFGGGTK |
| | VEIK (SEQ ID NO: 70) |
| 3A4 | VH: |
| VH3/Vκ4 | EVOLVQSGSELKKPGASVKVSCTASGFNIKDDYMYWVRQPPGKGLEWIGWIDP |
| | ENGDTEYASKFQDRVTVTADTSTNTAYMELSSLRSEDTAVYYCTLWLRRGLD |
| | YWGQGTLVTVSS (SEQ ID NO: 72) |
| | VL: |
| | DIVMTQSPLSLPVTPGEPASISCRSSKSLLHSNGYTYLFWFQQRPGQSPRLLIYR |
| | MSNLASGVPDRFSGSGSGTDFTLKISRVEAEDVGVYYCMQHLEYPFTFGGGTK |
| | VEIK (SEQ ID NO: 70) |
| 3M12 | VH: |
| VH3/Vκ2 | QVQLQESGPGLVKPSQTLSLTCSVTGYSITSGYYWNWIRQPPGKGLEWMGYITF |
| | DGANNYNPSLKNRVSISRDTSKNQFSLKLSSVTAEDTATYYCTRSSYDYDVLDY |
| | WGQGTTVTVSS (SEQ ID NO: 73) |
| | VL: |
| | DIQMTQSPSSLSASVGDRVTITCRASQDISNFLNWYQQKPGQPVKLLIYYTSRLH |
| | SGVPSRFSGSGSGTDFTLTISSLQPEDFATYFCQQGHTLPYTFGQGTKLEIK (SEQ |
| | ID NO: 74) |
| 3M12 | VH: |
| VH3/Vκ3 | QVQLQESGPGLVKPSQTLSLTCSVTGYSITSGYYWNWIRQPPGKGLEWMGYITF |
| | DGANNYNPSLKNRVSISRDTSKNQFSLKLSSVTAEDTATYYCTRSSYDYDVLDY |
| | WGQGTTVTVSS (SEQ ID NO: 73) |
| | VL: |
| | DIQMTQSPSSLSASVGDRVTITCRASQDISNFLNWYQQKPGQPVKLLIYYTSRLH |
| | SGVPSRFSGSGSGTDFTLTISSLQPEDFATYYCQQGHTLPYTFGQGTKLEIK (SEQ |
| | ID NO: 75) |
| 3M12 | VH: |
| VH4/Vκ2 | QVQLQESGPGLVKPSQTLSLTCTVTGYSITSGYYWNWIRQPPGKGLEWIGYITFD |
| | GANNYNPSLKNRVSISRDTSKNQFSLKLSSVTAEDTATYYCTRSSYDYDVLDYW |
| | GQGTTVTVSS (SEQ ID NO: 76) |
| | VL: |
| | DIQMTQSPSSLSASVGDRVTITCRASQDISNFLNWYQQKPGQPVKLLIYYTSRLH |
| | SGVPSRFSGSGSGTDFTLTISSLQPEDFATYFCQQGHTLPYTFGQGTKLEIK (SEQ |
| | ID NO: 74) |
| 3M12 | VH: |
| VH4/Vκ3 | QVQLQESGPGLVKPSQTLSLTCTVTGYSITSGYYWNWIRQPPGKGLEWIGYITFD |
| | GANNYNPSLKNRVSISRDTSKNQFSLKLSSVTAEDTATYYCTRSSYDYDVLDYW |
| | GQGTTVTVSS (SEQ ID NO: 76) |
| | VL: |
| | DIQMTQSPSSLSASVGDRVTITCRASQDISNFLNWYQQKPGQPVKLLIYYTSRLH |
| | SGVPSRFSGSGSGTDFTLTISSLQPEDFATYYCQQGHTLPYTFGQGTKLEIK (SEQ |
| | ID NO: 75) |
| 5H12 | VH: |
| VH5 (C33Y*)/Vκ3 | QVQLVQSGAEVKKPGASVKVSCKASGYSFTDYYINWVRQAPGQGLEWMGWIY |
| | PGSGNTRYSERFKGRVTITRDTSASTAYMELSSLRSEDTAVYYCAREDYYPYH |
| | GMDYWGQGTLVTVSS (SEQ ID NO: 77) |
| | VL: |
| | DIVLTQSPDSLAVSLGERATINCRASESVDGYDNSFMHWYQQKPGQPPKLLIFR |
| | ASNLESGVPDRFSGSGSRTDFTLTISSLQAEDVAVYYCQQSSEDPWTFGQGTKL |
| | EIK (SEQ ID NO: 78) |
| 5H12 | VH: |
| VH5 (C33D*)/Vκ4 | QVQLVQSGAEVKKPGASVKVSCKASGYSFTDYDINWVRQAPGQGLEWMGWIY |
| | PGSGNTRYSERFKGRVTITRDTSASTAYMELSSLRSEDTAVYYCAREDYYPYH |
| | GMDYWGQGTLVTVSS (SEQ ID NO: 79) |
| | VL: |
| | DIVMTQSPDSLAVSLGERATINCRASESVDGYDNSFMHWYQQKPGQPPKLLIFR |
| | ASNLESGVPDRFSGSGSGTDFTLTISSLQAEDVAVYYCQQSSEDPWTFGQGTKL |
| | EIK (SEQ ID NO: 80) |
| 5H12 | VH: |
| VH5 (C33Y*)/Vκ4 | QVQLVQSGAEVKKPGASVKVSCKASGYSFTDYYINWVRQAPGQGLEWMGWIY |
| | PGSGNTRYSERFKGRVTITRDTSASTAYMELSSLRSEDTAVYYCAREDYYPYH |
| | GMDYWGQGTLVTVSS (SEQ ID NO: 77) |
| | VL: |
| | DIVMTQSPDSLAVSLGERATINCRASESVDGYDNSFMHWYQQKPGQPPKLLIFR |
| | ASNLESGVPDRFSGSGSGTDFTLTISSLQAEDVAVYYCQQSSEDPWTFGQGTKL |
| | EIK (SEQ ID NO: 80) |
| Anti-TfR1 | VH: |
| clone 8 | QVQLVQSGAEVKKPGESLKISCKGSGYSFTSYWIGWVRQMPGKGLEWMGIIYP |
| | GDSDTRYSPSFQGQVTISADKSISTAYLQWSSLKASDTAMYYCARFPYDSSGYY |
| | SFDYWGQGTLVTVSS (SEQ ID NO: 154) |
| | VL: |
| | DIQMTQSPSSLSASVGDRVTITCRASQSISSYLNWYQQKPGKAPKLLIYAASSLQ |
| | SGVPSRFSGSGSGTDFTLTISSLQPEDFATYYCQQSYSTPLTFGGGTKVEIK (SEQ |
| | ID NO: 155) |

*mutation positions are according to Kabat numbering of the respective VH sequences containing the mutations
**CDRs according to the Kabat numbering system are bolded

[0088] In some embodiments, the anti-TfR1 antibody of the present disclosure comprises a VH comprising the CDR-H1, CDR-H2, and CDR-H3 of any one of the anti-TfR1 antibodies provided in Table 3 and comprises one or more (e.g., 1, 2, 3, 4, 5, 6, 7, 8, 9, 10 or more) amino acid variations in the framework regions as compared with the respective VH provided in Table 3. Alternatively or in addition (e.g., in addition), the anti-TfR1 antibody of the present disclosure comprises a VL comprising the CDR-L1, CDR-L2, and CDR-L3 of any one of the anti-TfR1 antibodies provided in Table 3 and comprises one or more (e.g., 1, 2, 3, 4, 5, 6, 7, 8, 9, 10 or more) amino acid variations in the framework regions as compared with the respective VL provided in Table 3.

[0089] In some embodiments, the anti-TfR1 antibody of the present disclosure comprises a VH comprising the CDR-H1, CDR-H2, and CDR-H3 of any one of the anti-TfR1 antibodies provided in Table 3 and comprising an amino acid sequence that is at least 70% (e.g., at least 70%, at least 75%, at least 80%, at least 85%, at least 90%, at least 95%, at least 99%) identical in the framework regions as compared with the respective VH provided in Table 3. Alternatively or in addition (e.g., in addition), the anti-TfR1 antibody of the present disclosure comprises a VL comprising the CDR-L1, CDR-L2, and CDR-L3 of any one of the anti-TfR1 antibodies provided in Table 3 and comprising an amino acid sequence that is at least 70% (e.g., at least 70%, at least 75%, at least 80%, at least 85%, at least 90%, at least 95%, at least 99%) identical in the framework regions compared with the respective VL provided in Table 3.

[0090] In some embodiments, the anti-TfR1 antibody of the present disclosure comprises a VH comprising the amino acid sequence of SEQ ID NO: 69 and a VL comprising the amino acid sequence of SEQ ID NO: 70.

[0091] In some embodiments, the anti-TfR1 antibody of the present disclosure comprises a VH comprising the amino acid sequence of SEQ ID NO: 71 and a VL comprising the amino acid sequence of SEQ ID NO: 70.

[0092] In some embodiments, the anti-TfR1 antibody of the present disclosure comprises a VH comprising the amino acid sequence of SEQ ID NO: 72 and a VL comprising the amino acid sequence of SEQ ID NO: 70.

[0093] In some embodiments, the anti-TfR1 antibody of the present disclosure comprises a VH comprising the amino acid sequence of SEQ ID NO: 73 and a VL comprising the amino acid sequence of SEQ ID NO: 74.

[0094] In some embodiments, the anti-TfR1 antibody of the present disclosure comprises a VH comprising the amino acid sequence of SEQ ID NO: 73 and a VL comprising the amino acid sequence of SEQ ID NO: 75.

[0095] In some embodiments, the anti-TfR1 antibody of the present disclosure comprises a VH comprising the amino acid sequence of SEQ ID NO: 76 and a VL comprising the amino acid sequence of SEQ ID NO: 74.

[0096] In some embodiments, the anti-TfR1 antibody of the present disclosure comprises a VH comprising the amino acid sequence of SEQ ID NO: 76 and a VL comprising the amino acid sequence of SEQ ID NO: 75.

[0097] In some embodiments, the anti-TfR1 antibody of the present disclosure comprises a VH comprising the amino acid sequence of SEQ ID NO: 77 and a VL comprising the amino acid sequence of SEQ ID NO: 78.

[0098] In some embodiments, the anti-TfR1 antibody of the present disclosure comprises a VH comprising the amino acid sequence of SEQ ID NO: 79 and a VL comprising the amino acid sequence of SEQ ID NO: 80.

[0099] In some embodiments, the anti-TfR1 antibody of the present disclosure comprises a VH comprising the amino acid sequence of SEQ ID NO: 77 and a VL comprising the amino acid sequence of SEQ ID NO: 80.

[0100] In some embodiments, the anti-TfR1 antibody of the present disclosure comprises a VH comprising the amino acid sequence of SEQ ID NO: 154 and a VL comprising the amino acid sequence of SEQ ID NO: 155.

[0101] In some embodiments, the anti-TfR1 antibody described herein is a full-length IgG, which can include a heavy constant region and a light constant region from a human antibody. In some embodiments, the heavy chain of any of the anti-TfR1 antibodies as described herein may comprise a heavy chain constant region (CH) or a portion thereof (e.g., CH1, CH2, CH3, or a combination thereof). The heavy chain constant region can of any suitable origin, e.g., human, mouse, rat, or rabbit. In one specific example, the heavy chain constant region is from a human IgG (a gamma heavy chain), e.g., IgG1, IgG2, or IgG4. An example of a human IgG1 constant region is given below:

(SEQ ID NO: 81)
[sequence omitted]

[0102] In some embodiments, the heavy chain of any of the anti-TfR1 antibodies described herein comprises a mutant human IgG1 constant region. For example, the introduction of LALA mutations (a mutant derived from mAb b12 that has been mutated to replace the lower hinge residues Leu234 Leu235 with Ala234 and Ala235) in the CH2 domain of human IgG1 is known to reduce Fcγ receptor binding (Bruhns, P., et al. (2009) and Xu, D. et al. (2000)). The mutant human IgG1 constant region is provided below (mutations bonded and underlined):

(SEQ ID NO: 82)
ASTKGPSVFPLAPSSKSTSGGTAALGCLVKDYFPEPVTVSWNSGALTSG
VHTFPAVLQSSGLYSLSSVVTVPSSSLGTQTYICNVNHKPSNTKVDKKV
EPKSCDKTHTCPPCPAPEAAGGPSVFLFPPKPKDTLMISRTPEVTCVVV
DVSHEDPEVKFNWYVDGVEVHNAKTKPREEQYNSTYRVVSVLTVLHQDW
LNGKEYKCKVSNKALPAPIEKTISKAKGQPREPQVYTLPPSRDELTKNQ
VSLTCLVKGFYPSDIAVEWESNGQPENNYKTTPPVLDSDGSFFLYSKLT
VDKSRWQQGNVFSCSVMHEALHNHYTQKSLSLSPGK

[0103] In some embodiments, the light chain of any of the anti-TfR1 antibodies described herein may further comprise a light chain constant region (CL), which can be any CL known in the art. In some examples, the CL is a kappa light chain. In other examples, the CL is a lambda light chain. In some embodiments, the CL is a kappa light chain, the sequence of which is provided below:

(SEQ ID NO: 83)
RTVAAPSVFIFPPSDEQLKSGTASVVCLLNNFYPREAKVQWKVDNALQS
GNSQESVTEQDSKDSTYSLSSTLTLSKADYEKHKVYACEVTHQGLSSPV
TKSFNRGEC

[0104] Other antibody heavy and light chain constant regions are well known in the art, e.g., those provided in the IMGT database (www.imgt.org) or at www.vbase2.org/vbstat.php., both of which are incorporated by reference herein.

[0105] In some embodiments, the anti-TfR1 antibody described herein comprises a heavy chain comprising any one of the VH as listed in Table 3 or any variants thereof and a heavy chain constant region that is at least 80%, at least 85%, at least 90%, at least 95%, or at least 99% identical to SEQ ID NO: 81 or SEQ ID NO: 82. In some embodiments, the anti-TfR1 antibody described herein comprises a heavy chain comprising any one of the VH as listed in Table 3 or any variants thereof and a heavy chain constant region that contains no more than 25 amino acid variations (e.g., no more than 25, 24, 23, 22, 21, 20, 19, 18, 17, 16, 15, 14, 13, 12, 11, 10, 9, 8, 7, 6, 5, 4, 3, 2, or 1 amino acid variation) as compared with SEQ ID NO: 81 or SEQ ID NO: 82. In some embodiments, the anti-TfR1 antibody described herein comprises a heavy chain comprising any one of the VH as listed in Table 3 or any variants thereof and a heavy chain constant region as set forth in SEQ ID NO: 81. In some embodiments, the anti-TfR1 antibody described herein comprises heavy chain comprising any one of the VH as listed in Table 3 or any variants thereof and a heavy chain constant region as set forth in SEQ ID NO: 82.

[0106] In some embodiments, the anti-TfR1 antibody described herein comprises a light chain comprising any one of the VL as listed in Table 3 or any variants thereof and a light chain constant region that is at least 80%, at least 85%, at least 90%, at least 95%, or at least 99% identical to SEQ ID NO: 83. In some embodiments, the anti-TfR1 antibody described herein comprises a light chain comprising any one of the VL as listed in Table 3 or any variants thereof and a light chain constant region contains no more than 25 amino acid variations (e.g., no more than 25, 24, 23, 22, 21, 20, 19, 18, 17, 16, 15, 14, 13, 12, 11, 10, 9, 8, 7, 6, 5, 4, 3, 2, or 1 amino acid variation) as compared with SEQ ID NO: 83. In some embodiments, the anti-TfR1 antibody described herein comprises a light chain comprising any one of the VL as listed in Table 3 or any variants thereof and a light chain constant region set forth in SEQ ID NO: 83.

[0107] Examples of IgG heavy chain and light chain amino acid sequences of the anti-TfR1 antibodies described are provided in Table 4 below.

TABLE 4
Heavy chain and light chain sequences
of examples of anti-TfR1 IgGs

| Antibody | IgG Heavy Chain/Light |
|---|---|
| | Chain Sequences** |
| 3A4 | Heavy Chain (with wild type |
| VH3 (N54T*)/Vκ4 | human IgG1 constant region) |
| | EVQLVQSGSELKKPGASVKVSCTASGFNIK DDYMYWVRQPPGKGLEWIGWIDPETGDTEY |
| | ASKFQDRVTVTADTSTNTAYMELSSLRSED |
| | TAVYYCTLWLRRGLDYWGQGTLVTVSSAST |
| | KGPSVFPLAPSSKSTSGGTAALGCLVKDYF |
| | PEPVTVSWNSGALTSGVHTFPAVLQSSGLY |
| | SLSSVVTVPSSSLGTQTYICNVNHKPSNTK |
| | VDKKVEPKSCDKTHTCPPCPAPELLGGPSV |
| | FLFPPKPKDTLMISRTPEVTCVVVDVSHED |
| | PEVKENWYVDGVEVHNAKTKPREEQYNSTY |
| | RVVSVLTVLHQDWLNGKEYKCKVSNKALPA |
| | PIEKTISKAKGQPREPQVYTLPPSRDELTK |
| | NQVSLTCLVKGFYPSDIAVEWESNGQPENN |
| | YKTTPPVLDSDGSFFLYSKLTVDKSRWQQG |
| | NVFSCSVMHEALHNHYTQKSLSLSPGK |
| | (SEQ ID NO: 84) |
| | Light Chain (with kappa light |
| | chain constant region) |
| | DIVMTQSPLSLPVTPGEPASISCRSSKSLL |
| | HSNGYTYLFWFQQRPGQSPRLLIYRMSNLA |
| | SGVPDRESGSGSGTDFTLKISRVEAEDVGV |
| | YYCMQHLEYPFTFGGGTKVEIKRTVAAPSV |
| | FIFPPSDEQLKSGTASVVCLLNNFYPREAK |
| | VQWKVDNALQSGNSQESVTEQDSKDSTYSL |
| | SSTLTLSKADYEKHKVYACEVTHQGLSSPV |
| | TKSFNRGEC |
| | (SEQ ID NO: 85) |
| 3A4 | Heavy Chain (with wild type |
| VH3 (N54S*)/Vκ4 | human IgG1 constant region) |
| | EVQLVQSGSELKKPGASVKVSCTASGFNIK |
| | DDYMYWVRQPPGKGLEWIGWIDPESGDTEY |
| | ASKFQDRVTVTADTSTNTAYMELSSLRSED |
| | TAVYYCTLWLRRGLDYWGQGTLVTVSSAST |
| | KGPSVFPLAPSSKSTSGGTAALGCLVKDYF |
| | PEPVTVSWNSGALTSGVHTFPAVLQSSGLY |
| | SLSSVVTVPSSSLGTQTYICNVNHKPSNTK |
| | VDKKVEPKSCDKTHTCPPCPAPELLGGPSV |
| | FLFPPKPKDTLMISRTPEVTCVVVDVSHED |
| | PEVKENWYVDGVEVHNAKTKPREEQYNSTY |
| | RVVSVLTVLHQDWLNGKEYKCKVSNKALPA |
| | PIEKTISKAKGQPREPQVYTLPPSRDELTK |
| | NQVSLTCLVKGFYPSDIAVEWESNGQPENN |
| | YKTTPPVLDSDGSFFLYSKLTVDKSRWQQG |
| | NVFSCSVMHEALHNHYTQKSLSLSPGK |
| | (SEQ ID NO: 86) |
| | Light Chain (with kappa light |
| | chain constant region) |
| | DIVMTQSPLSLPVTPGEPASISCRSSKSLL |
| | HSNGYTYLFWFQQRPGQSPRLLIYRMSNLA |
| | SGVPDRESGSGSGTDFTLKISRVEAEDVGV |
| | YYCMQHLEYPFTFGGGTKVEIKRTVAAPSV |
| | FIFPPSDEQLKSGTASVVCLLNNFYPREAK |
| | VQWKVDNALQSGNSQESVTEQDSKDSTYSL |
| | SSTLTLSKADYEKHKVYACEVTHQGLSSPV |
| | TKSFNRGEC |
| | (SEQ ID NO: 85) |
| 3A4 | Heavy Chain (with wild type |
| VH3 /Vκ4 | human IgG1 constant region) |
| | EVQLVQSGSELKKPGASVKVSCTASGFNIK |
| | DDYMYWVRQPPGKGLEWIGWIDPENGDTEY |
| | ASKFQDRVTVTADTSTNTAYMELSSLRSED |
| | TAVYYCTLWLRRGLDYWGQGTLVTVSSAST |
| | KGPSVFPLAPSSKSTSGGTAALGCLVKDYF |
| | PEPVTVSWNSGALTSGVHTFPAVLQSSGLY |
| | SLSSVVTVPSSSLGTQTYICNVNHKPSNTK |
| | VDKKVEPKSCDKTHTCPPCPAPELLGGPSV |
| | FLFPPKPKDTLMISRTPEVTCVVVDVSHED |
| | PEVKFNWYVDGVEVHNAKTKPREEQYNSTY |
| | RVVSVLTVLHQDWLNGKEYKCKVSNKALPA |
| | PIEKTISKAKGQPREPQVYTLPPSRDELTK |
| | NQVSLTCLVKGFYPSDIAVEWESNGQPENN |
| | YKTTPPVLDSDGSFFLYSKLTVDKSRWQQG |
| | NVFSCSVMHEALHNHYTQKSLSLSPGK |
| | (SEQ ID NO: 87) |
| | Light Chain (with kappa light |
| | chain constant region) |
| | DIVMTQSPLSLPVTPGEPASISCRSSKSLL |
| | HSNGYTYLFWFQQRPGQSPRLLIYRMSNLA |
| | SGVPDRESGSGSGTDFTLKISRVEAEDVGV |
| | YYCMQHLEYPFTFGGGTKVEIKRTVAAPSV |
| | FIFPPSDEQLKSGTASVVCLLNNFYPREAK |
| | VQWKVDNALQSGNSQESVTEQDSKDSTYSL |
| | SSTLTLSKADYEKHKVYACEVTHQGLSSPV |
| | TKSFNRGEC |
| | (SEQ ID NO: 85) |
| 3M12 | Heavy Chain (with wild type |
| VH3/Vκ2 | human IgG1 constant region) |
| | QVQLQESGPGLVKPSQTLSLTCSVTGYSIT |
| | SGYYWNWIRQPPGKGLEWMGYITFDGANNY |
| | NPSLKNRVSISRDTSKNQFSLKLSSVTAED |
| | TATYYCTRSSYDYDVLDYWGQGTTVTVSSA |
| | STKGPSVFPLAPSSKSTSGGTAALGCLVKD |
| | YFPEPVTVSWNSGALTSGVHTFPAVLQSSG |
| | LYSLSSVVTVPSSSLGTQTYICNVNHKPSN |
| | TKVDKKVEPKSCDKTHTCPPCPAPELLGGP |
| | SVFLFPPKPKDTLMISRTPEVTCVVVDVSH |
| | EDPEVKENWYVDGVEVHNAKTKPREEQYNS |
| | TYRVVSVLTVLHQDWLNGKEYKCKVSNKAL |
| | PAPIEKTISKAKGQPREPQVYTLPPSRDEL |
| | TKNQVSLTCLVKGFYPSDIAVEWESNGQPE |
| | NNYKTTPPVLDSDGSFFLYSKLTVDKSRWQ |
| | QGNVFSCSVMHEALHNHYTQKSLSLSPGK |
| | (SEQ ID NO: 88) |
| | Light Chain (with kappa light |
| | chain constant region) |
| | DIQMTQSPSSLSASVGDRVTITCRASQDIS |
| | NFLNWYQQKPGQPVKLLIYYTSRLHSGVPS |
| | RFSGSGSGTDFTLTISSLQPEDFATYFCQQ |
| | GHTLPYTFGQGTKLEIKRTVAAPSVFIFPP |
| | SDEQLKSGTASVVCLLNNFYPREAKVQWKV |
| | DNALQSGNSQESVTEQDSKDSTYSLSSTLT |
| | LSKADYEKHKVYACEVTHQGLSSPVTKSFN |
| | RGEC |
| | (SEQ ID NO: 89) |
| 3M12 | Heavy Chain (with wild type |
| VH3/Vκ3 | human IgG1 constant region) |
| | QVQLQESGPGLVKPSQTLSLTCSVTGYSIT |
| | SGYYWNWIRQPPGKGLEWMGYITFDGANNY |
| | NPSLKNRVSISRDTSKNQFSLKLSSVTAED |
| | TATYYCTRSSYDYDVLDYWGQGTTVTVSSA |
| | STKGPSVFPLAPSSKSTSGGTAALGCLVKD |
| | YFPEPVTVSWNSGALTSGVHTFPAVLQSSG |
| | LYSLSSVVTVPSSSLGTQTYICNVNHKPSN |
| | TKVDKKVEPKSCDKTHTCPPCPAPELLGGP |
| | SVFLFPPKPKDTLMISRTPEVTCVVVDVSH |
| | EDPEVKFNWYVDGVEVHNAKTKPREEQYNS |
| | TYRVVSVLTVLHQDWLNGKEYKCKVSNKAL |
| | PAPIEKTISKAKGQPREPQVYTLPPSRDEL |
| | TKNQVSLTCLVKGFYPSDIAVEWESNGQPE |
| | NNYKTTPPVLDSDGSFFLYSKLTVDKSRWQ |
| | QGNVFSCSVMHEALHNHYTQKSLSLSPGK |
| | (SEQ ID NO: 88) |
| | Light Chain (with kappa light |
| | chain constant region) |
| | DIQMTQSPSSLSASVGDRVTITCRASQDIS |
| | NFLNWYQQKPGQPVKLLIYYTSRLHSGVPS |
| | RFSGSGSGTDFTLTISSLQPEDFATYYCQQ |
| | GHTLPYTFGQGTKLEIKRTVAAPSVFIFPP |
| | SDEQLKSGTASVVCLLNNFYPREAKVQWKV |
| | DNALQSGNSQESVTEQDSKDSTYSLSSTLT |
| | LSKADYEKHKVYACEVTHQGLSSPVTKSFN |
| | RGEC |
| | (SEQ ID NO: 90) |
| 3M12 | Heavy Chain (with wild type |
| VH4/Vκ2 | human IgG1 constant region) |
| | QVQLQESGPGLVKPSQTLSLTCTVTGYSIT |
| | SGYYWNWIRQPPGKGLEWIGYITFDGANNY |
| | NPSLKNRVSISRDTSKNQFSLKLSSVTAED |
| | TATYYCTRSSYDYDVLDYWGQGTTVTVSSA |
| | STKGPSVFPLAPSSKSTSGGTAALGCLVKD |
| | YFPEPVTVSWNSGALTSGVHTFPAVLQSSG |
| | LYSLSSVVTVPSSSLGTQTYICNVNHKPSN |
| | TKVDKKVEPKSCDKTHTCPPCPAPELLGGP |
| | SVFLFPPKPKDTLMISRTPEVTCVVVDVSH |
| | EDPEVKFNWYVDGVEVHNAKTKPREEQYNS |
| | TYRVVSVLTVLHQDWLNGKEYKCKVSNKAL |
| | PAPIEKTISKAKGQPREPQVYTLPPSRDEL |
| | TKNQVSLTCLVKGFYPSDIAVEWESNGQPE |
| | NNYKTTPPVLDSDGSFFLYSKLTVDKSRWQ |
| | QGNVFSCSVMHEALHNHYTQKSLSLSPGK |
| | (SEQ ID NO: 91) |
| | Light Chain (with kappa light |
| | chain constant region) |
| | DIQMTQSPSSLSASVGDRVTITCRASQDIS |
| | NFLNWYQQKPGQPVKLLIYYTSRLHSGVPS |
| | RFSGSGSGTDFTLTISSLQPEDFATYFCQQ |
| | GHTLPYTFGQGTKLEIKRTVAAPSVFIFPP |
| | SDEQLKSGTASVVCLLNNFYPREAKVQWKV |
| | DNALQSGNSQESVTEQDSKDSTYSLSSTLT |
| | LSKADYEKHKVYACEVTHQGLSSPVTKSFN |
| | RGEC |
| | (SEQ ID NO: 89) |
| 3M12 | Heavy Chain (with wild type |
| VH4/Vκ3 | human IgG1 constant region) |
| | QVQLQESGPGLVKPSQTLSLTCTVTGYSIT |
| | SGYYWNWIRQPPGKGLEWIGYITFDGANNY |
| | NPSLKNRVSISRDTSKNQFSLKLSSVTAED |
| | TATYYCTRSSYDYDVLDYWGQGTTVTVSSA |
| | STKGPSVFPLAPSSKSTSGGTAALGCLVKD |
| | YFPEPVTVSWNSGALTSGVHTFPAVLQSSG |
| | LYSLSSVVTVPSSSLGTQTYICNVNHKPSN |
| | TKVDKKVEPKSCDKTHTCPPCPAPELLGGP |
| | SVFLFPPKPKDTLMISRTPEVTCVVVDVSH |
| | EDPEVKFNWYVDGVEVHNAKTKPREEQYNS |
| | TYRVVSVLTVLHQDWLNGKEYKCKVSNKAL |
| | PAPIEKTISKAKGQPREPQVYTLPPSRDEL |
| | TKNQVSLTCLVKGFYPSDIAVEWESNGQPE |
| | NNYKTTPPVLDSDGSFFLYSKLTVDKSRWQ |
| | QGNVFSCSVMHEALHNHYTQKSLSLSPGK |
| | (SEQ ID NO: 91) |
| | Light Chain (with kappa light |
| | chain constant region) |
| | DIQMTQSPSSLSASVGDRVTITCRASQDIS |
| | NFLNWYQQKPGQPVKLLIYYTSRLHSGVPS |
| | RFSGSGSGTDFTLTISSLQPEDFATYYCQQ |
| | GHTLPYTFGQGTKLEIKRTVAAPSVFIFPP |
| | SDEQLKSGTASVVCLLNNFYPREAKVQWKV |
| | DNALQSGNSQESVTEQDSKDSTYSLSSTLT |
| | LSKADYEKHKVYACEVTHQGLSSPVTKSFN |
| | RGEC |
| | (SEQ ID NO: 90) |
| 5H12 | Heavy Chain (with wild type |
| VH5 (C33Y*)/Vκ3 | human IgG1 constant region) |
| | QVQLVQSGAEVKKPGASVKVSCKASGYSFT |
| | DYYINWVRQAPGQGLEWMGWIYPGSGNTRY |
| | SERFKGRVTITRDTSASTAYMELSSLRSED |
| | TAVYYCAREDYYPYHGMDYWGQGTLVTVSS |
| | ASTKGPSVFPLAPSSKSTSGGTAALGCLVK |
| | DYFPEPVTVSWNSGALTSGVHTFPAVLQSS |
| | GLYSLSSVVTVPSSSLGTQTYICNVNHKPS |
| | NTKVDKKVEPKSCDKTHTCPPCPAPELLGG |
| | PSVFLFPPKPKDTLMISRTPEVTCVVVDVS |
| | HEDPEVKFNWYVDGVEVHNAKTKPREEQYN |
| | STYRVVSVLTVLHQDWLNGKEYKCKVSNKA |
| | LPAPIEKTISKAKGQPREPQVYTLPPSRDE |
| | LTKNQVSLTCLVKGFYPSDIAVEWESNGQP |
| | ENNYKTTPPVLDSDGSFFLYSKLTVDKSRW |
| | QQGNVFSCSVMHEALHNHYTQKSLSLSPGK |
| | (SEQ ID NO: 92) |
| | Light Chain (with kappa light |
| | chain constant region) |
| | DIVLTQSPDSLAVSLGERATINCRASESVD |
| | GYDNSFMHWYQQKPGQPPKLLIFRASNLES |
| | GVPDRESGSGSRTDFTLTISSLQAEDVAVY |
| | YCQQSSEDPWTFGQGTKLEIKRTVAAPSVF |
| | IFPPSDEQLKSGTASVVCLLNNFYPREAKV |
| | QWKVDNALQSGNSQESVTEQDSKDSTYSLS |
| | STLTLSKADYEKHKVYACEVTHQGLSSPVT |
| | KSFNRGEC |
| | (SEQ IDNO: 93) |
| 5H12 | Heavy Chain (with wild type |
| VH5 (C33D*)/Vκ4 | human IgG1 constant region) |
| | QVQLVQSGAEVKKPGASVKVSCKASGYSFT |
| | DYDINWVRQAPGQGLEWMGWIYPGSGNTRY |
| | SERFKGRVTITRDTSASTAYMELSSLRSED |
| | TAVYYCAREDYYPYHGMDYWGQGTLVTVSS |
| | ASTKGPSVFPLAPSSKSTSGGTAALGCLVK |
| | DYFPEPVTVSWNSGALTSGVHTFPAVLQSS |
| | GLYSLSSVVTVPSSSLGTQTYICNVNHKPS |
| | NTKVDKKVEPKSCDKTHTCPPCPAPELLGG |
| | PSVFLFPPKPKDTLMISRTPEVTCVVVDVS |
| | HEDPEVKFNWYVDGVEVHNAKTKPREEQYN |
| | STYRVVSVLTVLHQDWLNGKEYKCKVSNKA |
| | LPAPIEKTISKAKGQPREPQVYTLPPSRDE |
| | LTKNQVSLTCLVKGFYPSDIAVEWESNGQP |
| | ENNYKTTPPVLDSDGSFFLYSKLTVDKSRW |
| | QQGNVFSCSVMHEALHNHYTQKSLSLSPGK |
| | (SEQ ID NO: 94) |
| | Light Chain (with kappa light |
| | chain constant region) |
| | DIVMTQSPDSLAVSLGERATINCRASESVD |
| | GYDNSFMHWYQQKPGQPPKLLIFRASNLES |
| | GVPDRESGSGSGTDFTLTISSLQAEDVAVY |
| | YCQQSSEDPWTFGQGTKLEIKRTVAAPSVF |
| | IFPPSDEQLKSGTASVVCLLNNFYPREAKV |
| | QWKVDNALQSGNSQESVTEQDSKDSTYSLS |
| | STLTLSKADYEKHKVYACEVTHQGLSSPVT |
| | KSFNRGEC |
| | (SEQ ID NO: 95) |
| 5H12 | Heavy Chain (with wild type |
| VH5 (C33Y*)/Vκ4 | human IgG1 constant region) |
| | QVQLVQSGAEVKKPGASVKVSCKASGYSFT |
| | DYYINWVRQAPGQGLEWMGWIYPGSGNTRY |
| | SERFKGRVTITRDTSASTAYMELSSLRSED |
| | TAVYYCAREDYYPYHGMDYWGQGTLVTVSS |
| | ASTKGPSVFPLAPSSKSTSGGTAALGCLVK |
| | DYFPEPVTVSWNSGALTSGVHTFPAVLQSS |
| | GLYSLSSVVTVPSSSLGTQTYICNVNHKPS |
| | NTKVDKKVEPKSCDKTHTCPPCPAPELLGG |
| | PSVFLFPPKPKDTLMISRTPEVTCVVVDVS |
| | HEDPEVKFNWYVDGVEVHNAKTKPREEQYN |
| | STYRVVSVLTVLHQDWLNGKEYKCKVSNKA |
| | LPAPIEKTISKAKGQPREPQVYTLPPSRDE |
| | LTKNQVSLTCLVKGFYPSDIAVEWESNGQP |
| | ENNYKTTPPVLDSDGSFFLYSKLTVDKSRW |
| | QQGNVFSCSVMHEALHNHYTQKSLSLSPGK |
| | (SEQ ID NO: 92) |
| | Light Chain (with kappa light |
| | chain constant region) |
| | DIVMTQSPDSLAVSLGERATINCRASESVD |
| | GYDNSFMHWYQQKPGQPPKLLIFRASNLES |
| | GVPDRESGSGSGTDFTLTISSLQAEDVAVY |
| | YCQQSSEDPWTFGQGTKLEIKRTVAAPSVF |
| | IFPPSDEQLKSGTASVVCLLNNFYPREAKV |
| | QWKVDNALQSGNSQESVTEQDSKDSTYSLS |
| | STLTLSKADYEKHKVYACEVTHQGLSSPVT |
| | KSFNRGEC |
| | (SEQ ID NO: 95) |
| Anti-TfR1 clone 8 | VH: |
| | QVQLVQSGAEVKKPGESLKISCKGSGYSFT |
| | SYWIGWVRQMPGKGLEWMGIIYPGDSDTRY |
| | SPSFQGQVTISADKSISTAYLQWSSLKASD |
| | TAMYYCARFPYDSSGYYSFDYWGQGTLVTV |
| | SSASTKGPSVFPLAPSSKSTSGGTAALGCL |
| | VKDYFPEPVTVSWNSGALTSGVHTFPAVLQ |
| | SSGLYSLSSVVTVPSSSLGTQTYICNVNHK |
| | PSNTKVDKKVEPKSCDKTHTCPPCPAPELL |
| | GGPSVFLFPPKPKDTLMISRTPEVTCVVVD |
| | VSHEDPEVKFNWYVDGVEVHNAKTKPREEQ |
| | YNSTYRVVSVLTVLHQDWLNGKEYKCKVSN |
| | KALPAPIEKTISKAKGQPREPQVYTLPPSR |
| | DELTKNQVSLTCLVKGFYPSDIAVEWESNG |
| | QPENNYKTTPPVLDSDGSFFLYSKLTVDKS |
| | RWQQGNVFSCSVMHEALHNHYTQKSLSLSP |
| | GK |
| | (SEQ ID NO: 156) |
| | VL: |
| | DIQMTQSPSSLSASVGDRVTITCRASQSIS |
| | SYLNWYQQKPGKAPKLLIYAASSLQSGVPS |
| | RFSGSGSGTDFTLTISSLQPEDFATYYCQQ |
| | SYSTPLTFGGGTKVEIKRTVAAPSVFIFPP |
| | SDEQLKSGTASVVCLLNNFYPREAKVQWKV |
| | DNALQSGNSQESVTEQDSKDSTYSLSSTLT |
| | LSKADYEKHKVYACEVTHQGLSSPVTKSFN |
| | RGEC |
| | (SEQ ID NO: 157) |

*mutation positions are according to Kabat numbering of the respective VH sequences containing the mutations
**CDRs according to the Kabat numbering system are bolded; VH/VL sequences underlined

[0108] In some embodiments, the anti-TfR1 antibody of the present disclosure comprises a heavy chain containing no more than 25 amino acid variations (e.g., no more than 25, 24, 23, 22, 21, 20, 19, 18, 17, 16, 15, 14, 13, 12, 11, 10, 9, 8, 7, 6, 5, 4, 3, 2, or 1 amino acid variation) as compared with the heavy chain as set forth in any one of SEQ ID NOs: 84, 86, 87, 88, 91, 92, 94, and 156. Alternatively or in addition (e.g., in addition), the anti-TfR1 antibody of the present disclosure comprises a light chain containing no more than 25 amino acid variations (e.g., no more than 25, 24, 23, 22, 21, 20, 19, 18, 17, 16, 15, 14, 13, 12, 11, 10, 9, 8, 7, 6, 5, 4, 3, 2, or 1 amino acid variation) as compared with the light chain as set forth in any one of SEQ ID NOs: 85, 89, 90, 93, 95, and 157.

[0109] In some embodiments, the anti-TfR1 antibody described herein comprises a heavy chain comprising an amino acid sequence that is at least 75% (e.g., 75%, 80%, 85%, 90%, 95%, 98%, or 99%) identical to any one of SEQ ID NOs: 84, 86, 87, 88, 91, 92, 94, and 156. Alternatively or in addition (e.g., in addition), the anti-TfR1 antibody described herein comprises a light chain comprising an amino acid sequence that is at least 75% (e.g., 75%, 80%, 85%, 90%, 95%, 98%, or 99%) identical to any one of SEQ ID NOs: 85, 89, 90, 93, 95, and 157. In some embodiments, the anti-TfR1 antibody described herein comprises a heavy chain comprising the amino acid sequence of any one of SEQ ID NOs: 84, 86, 87, 88, 91, 92, 94, and 156. Alternatively or in addition (e.g., in addition), the anti-TfR1 antibody described herein comprises a light chain comprising the amino acid sequence of any one of SEQ ID NOs: 85, 89, 90, 93, 95 and 157.

[0110] In some embodiments, the anti-TfR1 antibody of the present disclosure comprises a heavy chain comprising the amino acid sequence of SEQ ID NO: 84 and a light chain comprising the amino acid sequence of SEQ ID NO: 85.

[0111] In some embodiments, the anti-TfR1 antibody of the present disclosure comprises a heavy chain comprising the amino acid sequence of SEQ ID NO: 86 and a light chain comprising the amino acid sequence of SEQ ID NO: 85.

[0112] In some embodiments, the anti-TfR1 antibody of the present disclosure comprises a heavy chain comprising the amino acid sequence of SEQ ID NO: 87 and a light chain comprising the amino acid sequence of SEQ ID NO: 85.

[0113] In some embodiments, the anti-TfR1 antibody of the present disclosure comprises a heavy chain comprising the amino acid sequence of SEQ ID NO: 88 and a light chain comprising the amino acid sequence of SEQ ID NO: 89.

[0114] In some embodiments, the anti-TfR1 antibody of the present disclosure comprises a heavy chain comprising the amino acid sequence of SEQ ID NO: 88 and a light chain comprising the amino acid sequence of SEQ ID NO: 90.

[0115] In some embodiments, the anti-TfR1 antibody of the present disclosure comprises a heavy chain comprising the amino acid sequence of SEQ ID NO: 91 and a light chain comprising the amino acid sequence of SEQ ID NO: 89.

[0116] In some embodiments, the anti-TfR1 antibody of the present disclosure comprises a heavy chain comprising the amino acid sequence of SEQ ID NO: 91 and a light chain comprising the amino acid sequence of SEQ ID NO: 90.

[0117] In some embodiments, the anti-TfR1 antibody of the present disclosure comprises a heavy chain comprising the amino acid sequence of SEQ ID NO: 92 and a light chain comprising the amino acid sequence of SEQ ID NO: 93.

[0118] In some embodiments, the anti-TfR1 antibody of the present disclosure comprises a heavy chain comprising the amino acid sequence of SEQ ID NO: 94 and a light chain comprising the amino acid sequence of SEQ ID NO: 95.

[0119] In some embodiments, the anti-TfR1 antibody of the present disclosure comprises a heavy chain comprising the amino acid sequence of SEQ ID NO: 92 and a light chain comprising the amino acid sequence of SEQ ID NO: 95.

[0120] In some embodiments, the anti-TfR1 antibody of the present disclosure comprises a heavy chain comprising the amino acid sequence of SEQ ID NO: 156 and a light chain comprising the amino acid sequence of SEQ ID NO: 157.

[0121] In some embodiments, the anti-TfR1 antibody is a Fab fragment, Fab′ fragment, or F(ab′)2 fragment of an intact antibody (full-length antibody). Antigen binding fragment of an intact antibody (full-length antibody) can be prepared via routine methods (e.g., recombinantly or by digesting the heavy chain constant region of a full-length IgG using an enzyme such as papain). For example, F(ab′)2 fragments can be produced by pepsin or papain digestion of an antibody molecule, and Fab fragments that can be generated by reducing the disulfide bridges of F(ab′)2 fragments. In some embodiments, a heavy chain constant region in a Fab fragment of the anti-TfR1 antibody described herein comprises the amino acid sequence of:

[0122] ASTKGPSVFPLAPSSKSTSGGTAALGCLVKDYFPEPVTVSWNSGALTSGVHTFPAVLQSSGLYSLSSVVTVP SSSLGTQTYICNVNHKPSNTKVDKKVEPKSCDKTHT (SEQ ID NO: 96)

[0123] In some embodiments, the anti-TfR1 antibody described herein comprises a heavy chain comprising any one of the VH as listed in Table 3 or any variants thereof and a heavy chain constant region that is at least 80%, at least 85%, at least 90%, at least 95%, or at least 99% identical to SEQ ID NO: 96. In some embodiments, the anti-TfR1 antibody described herein comprises a heavy chain comprising any one of the VH as listed in Table 3 or any variants thereof and a heavy chain constant region that contains no more than 25 amino acid variations (e.g., no more than 25, 24, 23, 22, 21, 20, 19, 18, 17, 16, 15, 14, 13, 12, 11, 10, 9, 8, 7, 6, 5, 4, 3, 2, or 1 amino acid variation) as compared with SEQ ID NO: 96. In some embodiments, the anti-TfR1 antibody described herein comprises a heavy chain comprising any one of the VH as listed in Table 3 or any variants thereof and a heavy chain constant region as set forth in SEQ ID NO: 96.

[0124] In some embodiments, the anti-TfR1 antibody described herein comprises a light chain comprising any one of the VL as listed in Table 3 or any variants thereof and a light chain constant region that is at least 80%, at least 85%, at least 90%, at least 95%, or at least 99% identical to SEQ ID NO: 83. In some embodiments, the anti-TfR1 antibody described herein comprises a light chain comprising any one of the VL as listed in Table 3 or any variants thereof and a light chain constant region contains no more than 25 amino acid variations (e.g., no more than 25, 24, 23, 22, 21, 20, 19, 18, 17, 16, 15, 14, 13, 12, 11, 10, 9, 8, 7, 6, 5, 4, 3, 2, or 1 amino acid variation) as compared with SEQ ID NO: 83. In some embodiments, the anti-TfR1 antibody described herein comprises a light chain comprising any one of the VL as listed in Table 3 or any variants thereof and a light chain constant region set forth in SEQ ID NO: 83.

[0125] Examples of Fab heavy chain and light chain amino acid sequences of the anti-TfR1 antibodies described are provided in Table 5 below.

TABLE 5
Heavy chain and light chain sequences of
examples of anti-TfR1 Fabs

| | Fab Heavy Chain/Light |
|---|---|
| Antibody | Chain Sequences** |
| 3A4 | Heavy Chain (with partial |
| VH3 (N54T*)/ | human IgG1 constant region) |
| Vκ4 | EVQLVQSGSELKKPGASVKVSCTASGFNIKDDYMY |
| | WVRQPPGKGLEWIGWIDPETGDTEYASKFQDRVTV |
| | TADTSTNTAYMELSSLRSEDTAVYYCTLWLRRGLD |
| | YWGQGTLVTVSSASTKGPSVFPLAPSSKSTSGGTA |
| | ALGCLVKDYFPEPVTVSWNSGALTSGVHTFPAVLQ |
| | SSGLYSLSSVVTVPSSSLGTQTYICNVNHKPSNTK |
| | VDKKVEPKSCDKTHT |
| | (SEQ ID NO: 97) |
| | Light Chain (with kappa light |
| | chain constant region) |
| | DIVMTQSPLSLPVTPGEPASISCRSSKSLLHSNGY |
| | TYLFWFQQRPGQSPRLLIYRMSNLASGVPDRESGS |
| | GSGTDFTLKISRVEAEDVGVYYCMQHLEYPFTFGG |
| | GTKVEIKRTVAAPSVFIFPPSDEQLKSGTASVVCL |
| | LNNFYPREAKVQWKVDNALQSGNSQESVTEQDSKD |
| | STYSLSSTLTLSKADYEKHKVYACEVTHQGLSSPV |
| | TKSFNRGEC |
| | (SEQ ID NO: 85) |
| 3A4 | Heavy Chain (with partial |
| VH3 (N54S*)/ | human IgG1 constant region) |
| Vκ4 | EVQLVQSGSELKKPGASVKVSCTASGFNIKDDYMY |
| | WVRQPPGKGLEWIGWIDPESGDTEYASKFQDRVTV |
| | TADTSTNTAYMELSSLRSEDTAVYYCTLWLRRGLD |
| | YWGQGTLVTVSSASTKGPSVFPLAPSSKSTSGGTA |
| | ALGCLVKDYFPEPVTVSWNSGALTSGVHTFPAVLQ |
| | SSGLYSLSSVVTVPSSSLGTQTYICNVNHKPSNTK |
| | VDKKVEPKSCDKTHT |
| | (SEQ ID NO: 98) |
| | Light Chain (with kappa |
| | light chain constant region) |
| | DIVMTQSPLSLPVTPGEPASISCRSSKSLLHSNGY |
| | TYLFWFQQRPGQSPRLLIYRMSNLASGVPDRESGS |
| | GSGTDFTLKISRVEAEDVGVYYCMQHLEYPFTFGG |
| | GTKVEIKRTVAAPSVFIFPPSDEQLKSGTASVVCL |
| | LNNFYPREAKVQWKVDNALQSGNSQESVTEQDSKD |
| | STYSLSSTLTLSKADYEKHKVYACEVTHQGLSSPV |
| | TKSFNRGEC |
| | (SEQ ID NO: 85) |
| 3A4 | Heavy Chain (with partial |
| VH3 /Vκ4 | human IgG1 constant region) |
| | EVQLVQSGSELKKPGASVKVSCTASGFNIKDDYMY |
| | WVRQPPGKGLEWIGWIDPENGDTEYASKFQDRVTV |
| | TADTSTNTAYMELSSLRSEDTAVYYCTLWLRRGLD |
| | YWGQGTLVTVSSASTKGPSVFPLAPSSKSTSGGTA |
| | ALGCLVKDYFPEPVTVSWNSGALTSGVHTFPAVLQ |
| | SSGLYSLSSVVTVPSSSLGTQTYICNVNHKPSNTK |
| | VDKKVEPKSCDKTHT |
| | (SEQ ID NO: 99) |
| | Light Chain (with kappa |
| | light chain constant region) |
| | DIVMTQSPLSLPVTPGEPASISCRSSKSLLHSNGY |
| | TYLFWFQQRPGQSPRLLIYRMSNLASGVPDRESGS |
| | GSGTDFTLKISRVEAEDVGVYYCMQHLEYPFTFGG |
| | GTKVEIKRTVAAPSVFIFPPSDEQLKSGTASVVCL |
| | LNNFYPREAKVQWKVDNALQSGNSQESVTEQDSKD |
| | STYSLSSTLTLSKADYEKHKVYACEVTHQGLSSPV |
| | TKSFNRGEC |
| | (SEQ ID NO: 85) |
| 3M12 | Heavy Chain (with partial |
| VH3/Vκ2 | human IgG1 constant region) |
| | QVQLQESGPGLVKPSQTLSLTCSVTGYSITSGYYW |
| | NWIRQPPGKGLEWMGYITFDGANNYNPSLKNRVSI |
| | SRDTSKNQFSLKLSSVTAEDTATYYCTRSSYDYDV |
| | LDYWGQGTTVTVSSASTKGPSVFPLAPSSKSTSGG |
| | TAALGCLVKDYFPEPVTVSWNSGALTSGVHTFPAV |
| | LQSSGLYSLSSVVTVPSSSLGTQTYICNVNHKPSN |
| | TKVDKKVEPKSCDKTHT |
| | (SEQ ID NO: 100) |
| | Light Chain (with kappa |
| | light chain constant region) |
| | DIQMTQSPSSLSASVGDRVTITCRASQDISNFLNW |
| | YQQKPGQPVKLLIYYTSRLHSGVPSRFSGSGSGTD |
| | FTLTISSLQPEDFATYFCQQGHTLPYTFGQGTKLE |
| | IKRTVAAPSVFIFPPSDEQLKSGTASVVCLLNNFY |
| | PREAKVQWKVDNALQSGNSQESVTEQDSKDSTYSL |
| | SSTLTLSKADYEKHKVYACEVTHQGLSSPVTKSFN |
| | RGEC |
| | (SEQ ID NO: 89) |
| 3M12 | Heavy Chain (with partial |
| VH3/Vκ3 | human IgG1 constant region) |
| | QVQLQESGPGLVKPSQTLSLTCSVTGYSITSGYYW |
| | NWIRQPPGKGLEWMGYITFDGANNYNPSLKNRVSI |
| | SRDTSKNQFSLKLSSVTAEDTATYYCTRSSYDYDV |
| | LDYWGQGTTVTVSSASTKGPSVFPLAPSSKSTSGG |
| | TAALGCLVKDYFPEPVTVSWNSGALTSGVHTFPAV |
| | LQSSGLYSLSSVVTVPSSSLGTQTYICNVNHKPSN |
| | TKVDKKVEPKSCDKTHT |
| | (SEQ ID NO: 100) |
| | Light Chain (with kappa |
| | light chain constant region) |
| | DIQMTQSPSSLSASVGDRVTITCRASQDISNFLNW |
| | YQQKPGQPVKLLIYYTSRLHSGVPSRFSGSGSGTD |
| | FTLTISSLQPEDFATYYCQQGHTLPYTFGQGTKLE |
| | IKRTVAAPSVFIFPPSDEQLKSGTASVVCLLNNFY |
| | PREAKVQWKVDNALQSGNSQESVTEQDSKDSTYSL |
| | SSTLTLSKADYEKHKVYACEVTHQGLSSPVTKSFN |
| | RGEC |
| | (SEQ ID NO: 90) |
| 3M12 | Heavy Chain (with partial |
| VH4/Vκ2 | human IgG1 constant region) |
| | QVQLQESGPGLVKPSQTLSLTCTVTGYSITSGYYW |
| | NWIRQPPGKGLEWIGYITEDGANNYNPSLKNRVSI |
| | SRDTSKNQFSLKLSSVTAEDTATYYCTRSSYDYDV |
| | LDYWGQGTTVTVSSASTKGPSVFPLAPSSKSTSGG |
| | TAALGCLVKDYFPEPVTVSWNSGALTSGVHTFPAV |
| | LQSSGLYSLSSVVTVPSSSLGTQTYICNVNHKPSN |
| | TKVDKKVEPKSCDKTHT |
| | (SEQ ID NO: 101) |
| | Light Chain (with kappa |
| | light chain constant region) |
| | DIQMTQSPSSLSASVGDRVTITCRASQDISNFLNW |
| | YQQKPGQPVKLLIYYTSRLHSGVPSRFSGSGSGTD |
| | FTLTISSLQPEDFATYFCQQGHTLPYTFGQGTKLE |
| | IKRTVAAPSVFIFPPSDEQLKSGTASVVCLLNNFY |
| | PREAKVQWKVDNALQSGNSQESVTEQDSKDSTYSL |
| | SSTLTLSKADYEKHKVYACEVTHQGLSSPVTKSFN |
| | RGEC |
| | (SEQ ID NO: 89) |
| 3M12 | Heavy Chain (with partial |
| VH4/Vκ3 | human IgG1 constant region) |
| | QVQLQESGPGLVKPSQTLSLTCTVTGYSITSGYYW |
| | NWIRQPPGKGLEWIGYITFDGANNYNPSLKNRVSI |
| | SRDTSKNQFSLKLSSVTAEDTATYYCTRSSYDYDV |
| | LDYWGQGTTVTVSSASTKGPSVFPLAPSSKSTSGG |
| | TAALGCLVKDYFPEPVTVSWNSGALTSGVHTFPAV |
| | LQSSGLYSLSSVVTVPSSSLGTQTYICNVNHKPSN |
| | TKVDKKVEPKSCDKTHT |
| | (SEQ ID NO: 101) |
| | Light Chain (with kappa |
| | light chain constant region) |
| | DIQMTQSPSSLSASVGDRVTITCRASQDISNFLNW |
| | YQQKPGQPVKLLIYYTSRLHSGVPSRFSGSGSGTD |
| | FTLTISSLQPEDFATYYCQQGHTLPYTFGQGTKLE |
| | IKRTVAAPSVFIFPPSDEQLKSGTASVVCLLNNFY |
| | PREAKVQWKVDNALQSGNSQESVTEQDSKDSTYSL |
| | SSTLTLSKADYEKHKVYACEVTHQGLSSPVTKSFN |
| | RGEC |
| | (SEQ ID NO: 90) |
| 5H12 | Heavy Chain (with partial |
| VH5 (C33Y*)/ | human IgG1 constant region) |
| Vκ3 | QVQLVQSGAEVKKPGASVKVSCKASGYSFTDYYIN |
| | WVRQAPGQGLEWMGWIYPGSGNTRYSERFKGRVTI |
| | TRDTSASTAYMELSSLRSEDTAVYYCAREDYYPYH |
| | GMDYWGQGTLVTVSSASTKGPSVFPLAPSSKSTSG |
| | GTAALGCLVKDYFPEPVTVSWNSGALTSGVHTFPA |
| | VLQSSGLYSLSSVVTVPSSSLGTQTYICNVNHKPS |
| | NTKVDKKVEPKSCDKTHT |
| | (SEQ ID NO: 102) |
| | Light Chain (with kappa |
| | light chain constant region) |
| | DIVLTQSPDSLAVSLGERATINCRASESVDGYDNS |
| | FMHWYQQKPGQPPKLLIFRASNLESGVPDRESGSG |
| | SRTDFTLTISSLQAEDVAVYYCQQSSEDPWTFGQG |
| | TKLEIKRTVAAPSVFIFPPSDEQLKSGTASVVCLL |
| | NNFYPREAKVQWKVDNALQSGNSQESVTEQDSKDS |
| | TYSLSSTLTLSKADYEKHKVYACEVTHQGLSSPVT |
| | KSFNRGEC |
| | (SEQ ID NO: 93) |
| 5H12 | Heavy Chain (with partial |
| VH5 (C33D*)/ | human IgG1 constant region) |
| Vκ4 | QVQLVQSGAEVKKPGASVKVSCKASGYSFTDYDIN |
| | WVRQAPGQGLEWMGWIYPGSGNTRYSERFKGRVTI |
| | TRDTSASTAYMELSSLRSEDTAVYYCAREDYYPYH |
| | GMDYWGQGTLVTVSSASTKGPSVFPLAPSSKSTSG |
| | GTAALGCLVKDYFPEPVTVSWNSGALTSGVHTFPA |
| | VLQSSGLYSLSSVVTVPSSSLGTQTYICNVNHKPS |
| | NTKVDKKVEPKSCDKTHT |
| | (SEQ ID NO: 103) |
| | Light Chain (with kappa |
| | light chain constant region) |
| | DIVMTQSPDSLAVSLGERATINCRASESVDGYDNS |
| | FMHWYQQKPGQPPKLLIFRASNLESGVPDRESGSG |
| | SGTDFTLTISSLQAEDVAVYYCQQSSEDPWTFGQG |
| | TKLEIKRTVAAPSVFIFPPSDEQLKSGTASVVCLL |
| | NNFYPREAKVQWKVDNALQSGNSQESVTEQDSKDS |
| | TYSLSSTLTLSKADYEKHKVYACEVTHQGLSSPVT |
| | KSFNRGEC |
| | (SEQ ID NO: 95) |
| 5H12 | Heavy Chain (with partial |
| VH5 (C33Y*)/ | human IgG1 constant region) |
| Vκ4 | QVQLVQSGAEVKKPGASVKVSCKASGYSFTDYYIN |
| | WVRQAPGQGLEWMGWIYPGSGNTRYSERFKGRVTI |
| | TRDTSASTAYMELSSLRSEDTAVYYCAREDYYPYH |
| | GMDYWGQGTLVTVSSASTKGPSVFPLAPSSKSTSG |
| | GTAALGCLVKDYFPEPVTVSWNSGALTSGVHTFPA |
| | VLQSSGLYSLSSVVTVPSSSLGTQTYICNVNHKPS |
| | NTKVDKKVEPKSCDKTHT |
| | (SEQ ID NO: 102) |
| | Light Chain (with kappa |
| | light chain constant region) |
| | DIVMTQSPDSLAVSLGERATINCRASESVDGYDNS |
| | FMHWYQQKPGQPPKLLIFRASNLESGVPDRESGSG |
| | SGTDFTLTISSLQAEDVAVYYCQQSSEDPWTFGQG |
| | TKLEIKRTVAAPSVFIFPPSDEQLKSGTASVVCLL |
| | NNFYPREAKVQWKVDNALQSGNSQESVTEQDSKDS |
| | TYSLSSTLTLSKADYEKHKVYACEVTHQGLSSPVT |
| | KSFNRGEC |
| | (SEQ ID NO: 95) |
| Anti-TfR1 | VH: |
| clone 8 | QVQLVQSGAEVKKPGESLKISCKGSGYSFTSYWIG |
| Version 1 | WVRQMPGKGLEWMGIIYPGDSDTRYSPSFQGQVTI |
| | SADKSISTAYLQWSSLKASDTAMYYCARFPYDSSG |
| | YYSFDYWGQGTLVTVSSASTKGPSVFPLAPSSKST |
| | SGGTAALGCLVKDYFPEPVTVSWNSGALTSGVHTF |
| | PAVLQSSGLYSLSSVVTVPSSSLGTQTYICNVNHK |
| | PSNTKVDKKVEPKSCDKTHTCP |
| | (SEQ ID NO: 158) |
| | VL: |
| | DIQMTQSPSSLSASVGDRVTITCRASQSISSYLNW |
| | YQQKPGKAPKLLIYAASSLQSGVPSRFSGSGSGTD |
| | FTLTISSLQPEDFATYYCQQSYSTPLTFGGGTKVE |
| | IKRTVAAPSVFIFPPSDEQLKSGTASVVCLLNNFY |
| | PREAKVQWKVDNALQSGNSQESVTEQDSKDSTYSL |
| | SSTLTLSKADYEKHKVYACEVTHQGLSSPVTKSFN |
| | RGEC |
| | (SEQ ID NO: 157) |
| Anti-TfR1 | VH: |
| clone 8 | QVQLVQSGAEVKKPGESLKISCKGSGYSFTSYWIG |
| Version 2 | WVRQMPGKGLEWMGIIYPGDSDTRYSPSFQGQVTI |
| | SADKSISTAYLQWSSLKASDTAMYYCARFPYDSSG |
| | YYSFDYWGQGTLVTVSSASTKGPSVFPLAPSSKST |
| | SGGTAALGCLVKDYFPEPVTVSWNSGALTSGVHTF |
| | PAVLQSSGLYSLSSVVTVPSSSLGTQTYICNVNHK |
| | PSNTKVDKKVEPKSCDKTHT |
| | (SEQ ID NO: 159) |
| | VL: |
| | DIQMTQSPSSLSASVGDRVTITCRASQSISSYLNW |
| | YQQKPGKAPKLLIYAASSLQSGVPSRFSGSGSGTD |
| | FTLTISSLQPEDFATYYCQQSYSTPLTFGGGTKVE |
| | IKRTVAAPSVFIFPPSDEQLKSGTASVVCLLNNFY |
| | PREAKVQWKVDNALQSGNSQESVTEQDSKDSTYSL |
| | SSTLTLSKADYEKHKVYACEVTHQGLSSPVTKSFN |
| | RGEC |
| | (SEQ ID NO: 157) |

**mutation positions are according to Kabat numbering of the respective VH sequences containing the mutations
*CDRs according to the Kabat numbering system are bolded; VH/VL sequences underlined

[0126] In some embodiments, the anti-TfR1 antibody of the present disclosure comprises a heavy chain containing no more than 25 amino acid variations (e.g., no more than 25, 24, 23, 22, 21, 20, 19, 18, 17, 16, 15, 14, 13, 12, 11, 10, 9, 8, 7, 6, 5, 4, 3, 2, or 1 amino acid variation) as compared with the heavy chain as set forth in any one of SEQ ID NOs: 97-103, 158 and 159. Alternatively or in addition (e.g., in addition), the anti-TfR1 antibody of the present disclosure comprises a light chain containing no more than 25 amino acid variations (e.g., no more than 25, 24, 23, 22, 21, 20, 19, 18, 17, 16, 15, 14, 13, 12, 11, 10, 9, 8, 7, 6, 5, 4, 3, 2, or 1 amino acid variation) as compared with the light chain as set forth in any one of SEQ ID NOs: 85, 89, 90, 93, 95, and 157.

[0127] In some embodiments, the anti-TfR1 antibody described herein comprises a heavy chain comprising an amino acid sequence that is at least 75% (e.g., 75%, 80%, 85%, 90%, 95%, 98%, or 99%) identical to any one of SEQ ID NOs: 97-103, 158 and 159. Alternatively or in addition (e.g., in addition), the anti-TfR1 antibody described herein comprises a light chain comprising an amino acid sequence that is at least 75% (e.g., 75%, 80%, 85%, 90%, 95%, 98%, or 99%) identical to any one of SEQ ID NOs: 85, 89, 90, 93, 95, and 157. In some embodiments, the anti-TfR1 antibody described herein comprises a heavy chain comprising the amino acid sequence of any one of SEQ ID NOs: 97-103, 158 and 159. Alternatively or in addition (e.g., in addition), the anti-TfR1 antibody described herein comprises a light chain comprising the amino acid sequence of any one of SEQ ID NOs: 85, 89, 90, 93, 95, and 157.

[0128] In some embodiments, the anti-TfR1 antibody of the present disclosure comprises a heavy chain comprising the amino acid sequence of SEQ ID NO: 97 and a light chain comprising the amino acid sequence of SEQ ID NO: 85.

[0129] In some embodiments, the anti-TfR1 antibody of the present disclosure comprises a heavy chain comprising the amino acid sequence of SEQ ID NO: 98 and a light chain comprising the amino acid sequence of SEQ ID NO: 85.

[0130] In some embodiments, the anti-TfR1 antibody of the present disclosure comprises a heavy chain comprising the amino acid sequence of SEQ ID NO: 99 and a light chain comprising the amino acid sequence of SEQ ID NO: 85.

[0131] In some embodiments, the anti-TfR1 antibody of the present disclosure comprises a heavy chain comprising the amino acid sequence of SEQ ID NO: 100 and a light chain comprising the amino acid sequence of SEQ ID NO: 89.

[0132] In some embodiments, the anti-TfR1 antibody of the present disclosure comprises a heavy chain comprising the amino acid sequence of SEQ ID NO: 100 and a light chain comprising the amino acid sequence of SEQ ID NO: 90.

[0133] In some embodiments, the anti-TfR1 antibody of the present disclosure comprises a heavy chain comprising the amino acid sequence of SEQ ID NO: 101 and a light chain comprising the amino acid sequence of SEQ ID NO: 89.

[0134] In some embodiments, the anti-TfR1 antibody of the present disclosure comprises a heavy chain comprising the amino acid sequence of SEQ ID NO: 101 and a light chain comprising the amino acid sequence of SEQ ID NO: 90.

[0135] In some embodiments, the anti-TfR1 antibody of the present disclosure comprises a heavy chain comprising the amino acid sequence of SEQ ID NO: 102 and a light chain comprising the amino acid sequence of SEQ ID NO: 93.

[0136] In some embodiments, the anti-TfR1 antibody of the present disclosure comprises a heavy chain comprising the amino acid sequence of SEQ ID NO: 103 and a light chain comprising the amino acid sequence of SEQ ID NO: 95.

[0137] In some embodiments, the anti-TfR1 antibody of the present disclosure comprises a heavy chain comprising the amino acid sequence of SEQ ID NO: 102 and a light chain comprising the amino acid sequence of SEQ ID NO: 95.

[0138] In some embodiments, the anti-TfR1 antibody of the present disclosure comprises a heavy chain comprising the amino acid sequence of SEQ ID NO: 158 and a light chain comprising the amino acid sequence of SEQ ID NO: 157.

[0139] In some embodiments, the anti-TfR1 antibody of the present disclosure comprises a heavy chain comprising the amino acid sequence of SEQ ID NO: 159 and a light chain comprising the amino acid sequence of SEQ ID NO: 157.

### Other Known Anti-TfR1 Antibodies

[0140] Any other appropriate anti-TfR1 antibodies known in the art may be used as the muscle-targeting agent in the complexes disclosed herein. Examples of known anti-TfR1 antibodies, including associated references and binding epitopes, are listed in Table 6. In some embodiments, the anti-TfR1 antibody comprises the complementarity determining regions (CDR-H1, CDR-H2, CDR-H3, CDR-L1, CDR-L2, and CDR-L3) of any of the anti-TfR1 antibodies provided herein, e.g., anti-TfR1 antibodies listed in Table 6.

TABLE 6
List of anti-TfR1 antibody clones, including associated
references and binding epitope information

| Antibody | | |
|---|---|---|
| Clone Name | Reference(s) | Epitope/Notes |
| OKT9 | U.S. Pat. No. 4,364,934, filed Dec. 4, 1979, | Apical domain of TfR |
| | entitled “MONOCLONAL ANTIBODY | (residues 305-366 of |
| | TO A HUMAN EARLY THYMOCYTE | human TfR sequence |
| | ANTIGEN AND METHODS FOR | XM_052730.3, |
| | PREPARING SAME” | available in GenBank) |
| | Schneider C. et al. “Structural features of | |
| | the cell surface receptor for transferrin that | |
| | is recognized by the monoclonal antibody | |
| | OKT9.” J Biol Chem. 1982, 257: 14, 8516- | |
| | 8522. | |
| (From JCR) | WO 2015/098989, filed | Apical domain |
| Clone M11 | Dec. 24, 2014, “Novel anti-Transferrin | (residues 230-244 and |
| Clone M23 | receptor antibody that passes through | 326-347 of TfR) and |
| Clone M27 | blood-brain barrier” | protease-like domain |
| Clone B84 | U.S. Pat. No. 9,994,641, filed | (residues 461-473) |
| | Dec. 24, 2014, “”Novel anti-Transferrin | |
| | receptor antibody that passes through | |
| | blood-brain barrier” | |
| (From | WO 2016/081643, filed May 26. 2016, | Apical domain and |
| Genentech) | entitled “ANTI-TRANSFERRIN | non-apical regions |
| 7A4, 8A2, | RECEPTOR ANTIBODIES AND | |
| 15D2, 10D11, | METHODS OF USE” | |
| 7B10, 15G11, | U.S. Pat. No. 9,708,406, filed | |
| 16G5, 13C3, | May 20, 2014, “Anti-transferrin receptor | |
| 16G4, 16F6, | antibodies and methods of use” | |
| 7G7, 4C2, | | |
| 1B12, and | | |
| 13D4 | | |
| (From | Lee et al. “Targeting Rat Anti- | |
| Armagen) | Mouse Transferrin Receptor Monoclonal | |
| 8D3 | Antibodies through Blood-Brain Barrier in | |
| | Mouse” 2000, J Pharmacol. Exp. Ther., | |
| | 292: 1048-1052. | |
| | US Patent App. 2010/077498, filed | |
| | Sep. 11, 2008, entitled “COMPOSITIONS | |
| | AND METHODS FOR BLOOD-BRAIN | |
| | BARRIER DELIVERY IN THE MOUSE” | |
| OX26 | Haobam, B. et al. 2014. Rab17- | |
| | mediated recycling endosomes contribute | |
| | to autophagosome formation in response to | |
| | Group A Streptococcus invasion. Cellular | |
| | microbiology. 16: 1806-21. | |
| DF1513 | Ortiz-Zapater E et al. Trafficking | |
| | of the human transferrin receptor in plant | |
| | cells: effects of tyrphostin A23 and | |
| | brefeldin A. Plant J 48: 757-70 (2006). | |
| 1A1B2, | Commercially available anti- | Novus Biologicals |
| 66IG10, | transferrin receptor antibodies. | 8100 Southpark Way, |
| MEM-189, | | A-8 Littleton CO |
| JF0956, 29806, | | 80120 |
| 1A1B2, | | |
| TFRC/1818, | | |
| 1E6, 66Ig10, | | |
| TFRC/1059, | | |
| Q1/71, 23D10, | | |
| 13E4, | | |
| TFRC/1149, | | |
| ER-MP21, | | |
| YTA74.4, | | |
| BU54, 2B6, | | |
| RI7 217 | | |
| (From | US Patent App. 2011/0311544A1, | Does not compete |
| INSERM) | filed Jun. 25, 2005, entitled “ANTI-CD71 | with OKT9 |
| BA120g | MONOCLONAL ANTIBODIES AND | |
| | USES THEREOF FOR TREATING | |
| | MALIGNANT TUMOR CELLS” | |
| LUCA31 | U.S. Pat. No. 7,572,895, filed | “LUCA31 epitope” |
| | Jun. 7, 2004, entitled “TRANSFERRIN | |
| | RECEPTOR ANTIBODIES” | |
| (Salk Institute) | Trowbridge, I. S. et al. “Anti-transferrin | |
| B3/25 | receptor monoclonal antibody and | |
| T58/30 | toxin-antibody conjugates affect | |
| | growth of human tumour cells.” | |
| | Nature, 1981, volume 294, pages 171- | |
| | 173 | |
| R17 217.1.3, | Commercially available anti- | BioXcell |
| 5E9C11, | transferrin receptor antibodies. | 10 Technology Dr., |
| OKT9 | | Suite 2B |
| (BE0023 | | West Lebanon, NH |
| clone) | | 03784-1671 USA |
| BK19.9, | Gatter, K. C. et al. “Transferrin | |
| B3/25, T56/14 | receptors in human tissues: their | |
| and T58/1 | distribution and possible clinical | |
| | relevance.” J Clin Pathol. 1983 | |
| | May; 36(5): 539-45. | |

Anti-TfR1 antibody
CDRH1 (SEQ ID NO: 242)
CDRH2 (SEQ ID NO: 243)
CDRH3 (SEQ ID NO: 244)
CDRL1 (SEQ ID NO: 245)
CDRL2 (SEQ ID NO: 246)
CDRL3 (SEQ ID NO: 247)
VH (SEQ ID NO: 248)
VL(SEQ ID NO: 249)
Other anti-TfR1 antibody SEQ ID NOs

| | VH/VL | CDR1 | CDR2 | CDR3 |
|---|---|---|---|---|
| VH1 | 258 | 250 | 251 | 244 |
| VH2 | 259 | 250 | 252 | 244 |
| VH3 | 260 | 250 | 253 | 244 |
| VH4 | 261 | 250 | 252 | 244 |
| VL1 | 262 | 245 | 246 | 115 |
| VL2 | 263 | 245 | 246 | 115 |
| VL3 | 264 | 245 | 255 | 247 |
| VL4 | 265 | 256 | 257 | 247 |

[0141] In some embodiments, anti-TfR1 antibodies of the present disclosure include one or more of the CDR-H (e.g., CDR-H1, CDR-H2, and CDR-H3) amino acid sequences from any one of the anti-TfR1 antibodies selected from Table 6. In some embodiments, anti-TfR1 antibodies include the CDR-L1, CDR-L2, and CDR-L3 as provided for any one of the anti-TfR1 antibodies selected from Table 6. In some embodiments, anti-TfR1 antibodies include the CDR-H1, CDR-H2, CDR-H3, CDR-L1, CDR-L2, and CDR-L3 as provided for any one of the anti-TfR1 antibodies selected from Table 6.

[0142] In some embodiments, anti-TfR1 antibodies of the disclosure include any antibody that includes a heavy chain variable domain and/or (e.g., and) a light chain variable domain of any anti-TfR1 antibody, such as any one of the anti-TfR1 antibodies selected from Table 6. In some embodiments, anti-TfR1 antibodies of the disclosure include any antibody that includes the heavy chain variable and light chain variable pairs of any anti-TfR1 antibody, such as any one of the anti-TfR1 antibodies selected from Table 6.

[0143] Aspects of the disclosure provide anti-TfR1 antibodies having a heavy chain variable (VH) and/or (e.g., and) a light chain variable (VL) domain amino acid sequence homologous to any of those described herein. In some embodiments, the anti-TfR1 antibody comprises a heavy chain variable sequence or a light chain variable sequence that is at least 75% (e.g., 80%, 85%, 90%, 95%, 98%, or 99%) identical to the heavy chain variable sequence and/or any light chain variable sequence of any anti-TfR1 antibody, such as any one of the anti-TfR1 antibodies selected from Table 6. In some embodiments, the homologous heavy chain variable and/or (e.g., and) a light chain variable amino acid sequences do not vary within any of the CDR sequences provided herein. For example, in some embodiments, the degree of sequence variation (e.g., 75%, 80%, 85%, 90%, 95%, 98%, or 99%) may occur within a heavy chain variable and/or (e.g., and) a light chain variable sequence excluding any of the CDR sequences provided herein. In some embodiments, any of the anti-TfR1 antibodies provided herein comprise a heavy chain variable sequence and a light chain variable sequence that comprises a framework sequence that is at least 75%, 80%, 85%, 90%, 95%, 98%, or 99% identical to the framework sequence of any anti-TfR1 antibody, such as any one of the anti-TfR1 antibodies selected from Table 6.

[0144] An example of a transferrin receptor antibody that may be used in accordance with the present disclosure is described in International Application Publication WO 2016/081643, incorporated herein by reference. The amino acid sequences of this antibody are provided in Table 7.

TABLE 7
Heavy chain and light chain CDRs of an
example of a known anti-TfR1 antibody

| Sequence Type | Kabat | Chothia | Contact |
|---|---|---|---|
| CDR-H1 | SYWMH | GYTFTSY | TSYWMH |
| | (SEQ ID NO: 110) | (SEQ ID NO: 116) | (SEQ ID NO: 118) |
| CDR-H2 | EINPTNGRT | NPTNGR | WIGEINPTNGRTN |
| | NYIEKFKS | (SEQ ID NO: 117) | (SEQ ID NO: 119) |
| | (SEQ ID NO: 111) | | |
| CDR-H3 | GTRAYHY | GTRAYHY (SEQ ID NO: | ARGTRA |
| | (SEQ ID NO: 112) | 112) | (SEQ ID NO: 120) |
| CDR-L1 | RASDNLYSNLA | RASDNLYSNLA | YSNLAWY |
| | (SEQ ID NO: 113) | (SEQ ID NO: 113) | (SEQ ID NO: 121) |
| CDR-L2 | DATNLAD | DATNLAD | LLVYDATNLA |
| | (SEQ ID NO: 114) | (SEQ ID NO: 114) | (SEQ ID NO: 122) |
| CDR-L3 | QHFWGTPLT | QHFWGTPLT | QHFWGTPL |
| | (SEQ ID NO: 115) | (SEQ ID NO: 115) | (SEQ ID NO: 123) |

| | |
|---|---|
| Murine VH | QVQLQQPGAELVKPGASVKLSCKASGYTFTSYWMHWVKQRPGQGLEWIGEINP |
| | TNGRTNYIEKFKSKATLTVDKSSSTAYMQLSSLTSEDSAVYYCARGTRAYHYW |
| | GQGTSVTVSS (SEQ ID NO: 124) |
| Murine VL | DIQMTQSPASLSVSVGETVTITCRASDNLYSNLAWYQQKQGKSPQLLVYDATNL |
| | ADGVPSRFSGSGSGTQYSLKINSLQSEDFGTYYCQHFWGTPLTFGAGTKLELK |
| | (SEQ ID NO: 125) |
| Humanized VH | EVQLVQSGAEVKKPGASVKVSCKASGYTFTSYWMHWVRQAPGQRLEWIGEIN |
| | PTNGRTNYIEKFKSRATLTVDKSASTAYMELSSLRSEDTAVYYCARGTRAYHY |
| | WGQGTMVTVSS (SEQ ID NO: 128) |
| Humanized VL | DIQMTQSPSSLSASVGDRVTITCRASDNLYSNLA WYQQKPGKSPKLLVYDAT |
| | NLADGVPSRFSGSGSGTDYTLTISSLQPEDFATYYCQHFWGTPLTFGQGTKVE |
| | IK (SEQ ID NO: 129) |
| HC of chimeric | QVQLQQPGAELVKPGASVKLSCKASGYTFTSYWMHWVKQRPGQGLEWIGEINP |
| full-length IgG1 | TNGRTNYIEKFKSKATLTVDKSSSTAYMQLSSLTSEDSAVYYCARGTRAYHYW |
| | GQGTSVTVSSASTKGPSVFPLAPSSKSTSGGTAALGCLVKDYFPEPVTVSWNS |
| | GALTSGVHTFPAVLQSSGLYSLSSVVTVPSSSLGTQTYICNVNHKPSNTKVDK |
| | KVEPKSCDKTHTCPPCPAPELLGGPSVFLFPPKPKDTLMISRTPEVTCVVVDV |
| | SHEDPEVKFNWYVDGVEVHNAKTKPREEQYNSTYRVVSVLTVLHQDWLNGKEY |
| | KCKVSNKALPAPIEKTISKAKGQPREPQVYTLPPSRDELTKNQVSLTCLVKGF |
| | YPSDIAVEWESNGQPENNYKTTPPVLDSDGSFFLYSKLTVDKSRWQQGNVFSC |
| | SVMHEALHNHYTQKSLSLSPGK (SEQ ID NO: 132) |
| LC of chimeric | DIQMTQSPASLSVSVGETVTITCRASDNLYSNLA WYQQKQGKSPOLLVYDAT |
| full-length IgG1 | NLADGVPSRFSGSGSGTQYSLKINSLQSEDFGTYYCQHFWGTPLTFGAGTKLE |
| | LKRTVAAPSVFIFPPSDEQLKSGTASVVCLLNNFYPREAKVQWKVDNALQSGN |
| | SQESVTEQDSKDSTYSLSSTLTLSKADYEKHKVYACEVTHQGLSSPVTKSFNR |
| | GEC (SEQ ID NO: 133) |
| HC of fully human | EVQLVQSGAEVKKPGASVKVSCKASGYTFTSYWMHWVRQAPGQRLEWIGEIN |
| full-length IgG1 | PTNGRTNYIEKFKSRATLTVDKSASTAYMELSSLRSEDTAVYYCARGTRAYH |
| | YWGQGTMVTVSSASTKGPSVFPLAPSSKSTSGGTAALGCLVKDYFPEPVTVS |
| | WNSGALTSGVHTFPAVLQSSGLYSLSSVVTVPSSSLGTQTYICNVNHKPSNT |
| | KVDKKVEPKSCDKTHTCPPCPAPELLGGPSVFLFPPKPKDTLMISRTPEVTC |
| | VVVDVSHEDPEVKFNWYVDGVEVHNAKTKPREEQYNSTYRVVSVLTVLHQDW |
| | LNGKEYKCKVSNKALPAPIEKTISKAKGQPREPQVYTLPPSRDELTKNQVSL |
| | TCLVKGFYPSDIAVEWESNGQPENNYKTTPPVLDSDGSFFLYSKLTVDKSRW |
| | QQGNVFSCSVMHEALHNHYTQKSLSLSPGK (SEQ ID NO: 134) |
| LC of fully human | DIQMTQSPSSLSASVGDRVTITCRASDNLYSNLA WYQQKPGKSPKLLVYDA |
| full-length IgG1 | TNLADGVPSRFSGSGSGTDYTLTISSLQPEDFATYYCQHFWGTPLTFGQGTK |
| | VEIKRTVAAPSVFIFPPSDEQLKSGTASVVCLLNNFYPREAKVQWKVDNALQ |
| | SGNSQESVTEQDSKDSTYSLSSTLTLSKADYEKHKVYACEVTHQGLSSPVTK |
| | SFNRGEC (SEQ ID NO: 135) |
| HC of chimeric | QVQLQQPGAELVKPGASVKLSCKASGYTFTSYWMHWVKQRPGQGLEWIGEIN |
| Fab | PTNGRTNYIEKFKSKATLTVDKSSSTAYMQLSSLTSEDSAVYYCARGTRAYH |
| | YWGQGTSVTVSSASTKGPSVFPLAPSSKSTSGGTAALGCLVKDYFPEPVTVS |
| | WNSGALTSGVHTFPAVLQSSGLYSLSSVVTVPSSSLGTQTYICNVNHKPSNT |
| | KVDKKVEPKSCDKTHTCP (SEQ ID NO: 136) |
| HC of fully human | EVQLVQSGAEVKKPGASVKVSCKASGYTFTSYWMHWVRQAPGQRLEWIGEIN |
| Fab | PTNGRTNYIEKFKSRATLTVDKSASTAYMELSSLRSEDTAVYYCARGTRAYH |
| | YWGQGTMVTVSSASTKGPSVFPLAPSSKSTSGGTAALGCLVKDYFPEPVTVS |
| | WNSGALTSGVHTFPAVLQSSGLYSLSSVVTVPSSSLGTQTYICNVNHKPSNT |
| | KVDKKVEPKSCDKTHTCP (SEQ ID NO: 137) |

[0145] In some embodiments, the anti-TfR1 antibody of the present disclosure comprises a CDR-H1, a CDR-H2, and a CDR-H3 that are the same as the CDR-H1, CDR-H2, and CDR-H3 shown in Table 7. Alternatively or in addition (e.g., in addition), the anti-TfR1 antibody of the present disclosure comprises a CDR-L1, a CDR-L2, and a CDR-L3 that are the same as the CDR-L1, CDR-L2, and CDR-L3 shown in Table 7.

[0146] In some embodiments, the anti-TfR1 antibody of the present disclosure comprises a CDR-L3, which contains no more than 3 amino acid variations (e.g., no more than 3, 2, or 1 amino acid variation) as compared with the CDR-L3 as shown in Table 7. In some embodiments, the anti-TfR1 antibody of the present disclosure comprises a CDR-L3 containing one amino acid variation as compared with the CDR-L3 as shown in Table 7. In some embodiments, the anti-TfR1 antibody of the present disclosure comprises a CDR-L3 of QHFAGTPLT (SEQ ID NO: 126) according to the Kabat and Chothia definition system) or QHFAGTPL (SEQ ID NO: 127) according to the Contact definition system). In some embodiments, the anti-TfR1 antibody of the present disclosure comprises a CDR-H1, a CDR-H2, a CDR-H3, a CDR-L1 and a CDR-L2 that are the same as the CDR-H1, CDR-H2, and CDR-H3 shown in Table 7, and comprises a CDR-L3 of QHFAGTPLT (SEQ ID NO: 126) according to the Kabat and Chothia definition system) or QHFAGTPL (SEQ ID NO: 127) according to the Contact definition system).

[0147] In some embodiments, the anti-TfR1 antibody of the present disclosure comprises heavy chain CDRs that collectively are at least 80% (e.g., 80%, 85%, 90%, 95%, or 98%) identical to the heavy chain CDRs as shown in Table 7. Alternatively or in addition (e.g., in addition), the anti-TfR1 antibody of the present disclosure comprises light chain CDRs that collectively are at least 80% (e.g., 80%, 85%, 90%, 95%, or 98%) identical to the light chain CDRs as shown in Table 7.

[0148] In some embodiments, the anti-TfR1 antibody of the present disclosure comprises a VH comprising the amino acid sequence of SEQ ID NO: 124. Alternatively or in addition (e.g., in addition), the anti-TfR1 antibody of the present disclosure comprises a VL comprising the amino acid sequence of SEQ ID NO: 125.

[0149] In some embodiments, the anti-TfR1 antibody of the present disclosure comprises a VH comprising the amino acid sequence of SEQ ID NO: 128. Alternatively or in addition (e.g., in addition), the anti-TfR1 antibody of the present disclosure comprises a VL comprising the amino acid sequence of SEQ ID NO: 129.

[0150] In some embodiments, the anti-TfR1 antibody of the present disclosure comprises a VH containing no more than 25 amino acid variations (e.g., no more than 25, 24, 23, 22, 21, 20, 19, 18, 17, 16, 15, 14, 13, 12, 11, 10, 9, 8, 7, 6, 5, 4, 3, 2, or 1 amino acid variation) as compared with the VH as set forth in SEQ ID NO: 128. Alternatively or in addition (e.g., in addition), the anti-TfR1 antibody of the present disclosure comprises a VL containing no more than 15 amino acid variations (e.g., no more than 20, 19, 18, 17, 16, 15, 14, 13, 12, 11, 9, 8, 7, 6, 5, 4, 3, 2, or 1 amino acid variation) as compared with the VL as set forth in SEQ ID NO: 129.

[0151] In some embodiments, the anti-TfR1 antibody of the present disclosure is a full-length IgG1 antibody, which can include a heavy constant region and a light constant region from a human antibody. In some embodiments, the heavy chain of any of the anti-TfR1 antibodies as described herein may comprises a heavy chain constant region (CH) or a portion thereof (e.g., CH1, CH2, CH3, or a combination thereof). The heavy chain constant region can of any suitable origin, e.g., human, mouse, rat, or rabbit. In one specific example, the heavy chain constant region is from a human IgG (a gamma heavy chain), e.g., IgG1, IgG2, or IgG4. An example of human IgG1 constant region is given below:

(SEQ ID NO: 81)
[sequence omitted]

[0152] In some embodiments, the light chain of any of the anti-TfR1 antibodies described herein may further comprise a light chain constant region (CL), which can be any CL known in the art. In some examples, the CL is a kappa light chain. In other examples, the CL is a lambda light chain. In some embodiments, the CL is a kappa light chain, the sequence of which is provided below:

(SEQ ID NO: 83)
[sequence omitted]

[0153] In some embodiments, the anti-TfR1 antibody described herein is a chimeric antibody that comprises a heavy chain comprising the amino acid sequence of SEQ ID NO: 132. Alternatively or in addition (e.g., in addition), the anti-TfR1 antibody described herein comprises a light chain comprising the amino acid sequence of SEQ ID NO: 133.

[0154] In some embodiments, the anti-TfR1 antibody described herein is a fully human antibody that comprises a heavy chain comprising the amino acid sequence of SEQ ID NO: 134. Alternatively or in addition (e.g., in addition), the anti-TfR1 antibody described herein comprises a light chain comprising the amino acid sequence of SEQ ID NO: 135.

[0155] In some embodiments, the anti-TfR1 antibody is an antigen binding fragment (Fab) of an intact antibody (full-length antibody). In some embodiments, the anti-TfR1 Fab described herein comprises a heavy chain comprising the amino acid sequence of SEQ ID NO: 136. Alternatively or in addition (e.g., in addition), the anti-TfR1 Fab described herein comprises a light chain comprising the amino acid sequence of SEQ ID NO: 133. In some embodiments, the anti-TfR1 Fab described herein comprises a heavy chain comprising the amino acid sequence of SEQ ID NO: 137. Alternatively or in addition (e.g., in addition), the anti-TfR1 Fab described herein comprises a light chain comprising the amino acid sequence of SEQ ID NO: 135.

[0156] The anti-TfR1 antibodies described herein can be in any antibody form, including, but not limited to, intact (i.e., full-length) antibodies, antigen-binding fragments thereof (such as Fab, Fab′, F(ab′)2, Fv), single chain antibodies, bi-specific antibodies, or nanobodies. In some embodiments, the anti-TfR1 antibody described herein is a scFv. In some embodiments, the anti-TfR1 antibody described herein is a scFv-Fab (e.g., scFv fused to a portion of a constant region). In some embodiments, the anti-TfR1 antibody described herein is a scFv fused to a constant region (e.g., human IgG1 constant region as set forth in SEQ ID NO: 81).

[0157] In some embodiments, conservative mutations can be introduced into antibody sequences (e.g., CDRs or framework sequences) at positions where the residues are not likely to be involved in interacting with a target antigen (e.g., transferrin receptor), for example, as determined based on a crystal structure. In some embodiments, one, two or more mutations (e.g., amino acid substitutions) are introduced into the Fc region of an anti-TfR1 antibody described herein (e.g., in a CH2 domain (residues 231-340 of human IgG1) and/or (e.g., and) CH3 domain (residues 341-447 of human IgG1) and/or (e.g., and) the hinge region, with numbering according to the Kabat numbering system (e.g., the EU index in Kabat)) to alter one or more functional properties of the antibody, such as serum half-life, complement fixation, Fc receptor binding and/or (e.g., and) antigen-dependent cellular cytotoxicity.

[0158] In some embodiments, one, two or more mutations (e.g., amino acid substitutions) are introduced into the hinge region of the Fc region (CH1 domain) such that the number of cysteine residues in the hinge region are altered (e.g., increased or decreased) as described in, e.g., U.S. Pat. No. 5,677,425. The number of cysteine residues in the hinge region of the CH1 domain can be altered to, e.g., facilitate assembly of the light and heavy chains, or to alter (e.g., increase or decrease) the stability of the antibody or to facilitate linker conjugation.

[0159] In some embodiments, one, two or more mutations (e.g., amino acid substitutions) are introduced into the Fc region of a muscle-targeting antibody described herein (e.g., in a CH2 domain (residues 231-340 of human IgG1) and/or (e.g., and) CH3 domain (residues 341-447 of human IgG1) and/or (e.g., and) the hinge region, with numbering according to the Kabat numbering system (e.g., the EU index in Kabat)) to increase or decrease the affinity of the antibody for an Fc receptor (e.g., an activated Fc receptor) on the surface of an effector cell. Mutations in the Fc region of an antibody that decrease or increase the affinity of an antibody for an Fc receptor and techniques for introducing such mutations into the Fc receptor or fragment thereof are known to one of skill in the art. Examples of mutations in the Fc receptor of an antibody that can be made to alter the affinity of the antibody for an Fc receptor are described in, e.g., Smith P et al., (2012) PNAS 109: 6181-6186, U.S. Pat. No. 6,737,056, and International Publication Nos. WO 02/060919; WO 98/23289; and WO 97/34631, which are incorporated herein by reference.

[0160] In some embodiments, one, two or more amino acid mutations (i.e., substitutions, insertions or deletions) are introduced into an IgG constant domain, or FcRn-binding fragment thereof (preferably an Fc or hinge-Fc domain fragment) to alter (e.g., decrease or increase) half-life of the antibody in vivo. Sec, e.g., International Publication Nos. WO 02/060919; WO 98/23289; and WO 97/34631; and U.S. Pat. Nos. 5,869,046, 6,121,022, 6,277,375 and 6,165,745 for examples of mutations that will alter (e.g., decrease or increase) the half-life of an antibody in vivo.

[0161] In some embodiments, one, two or more amino acid mutations (i.e., substitutions, insertions or deletions) are introduced into an IgG constant domain, or FcRn-binding fragment thereof (preferably an Fc or hinge-Fc domain fragment) to decrease the half-life of the anti-TfR1 antibody in vivo. In some embodiments, one, two or more amino acid mutations (i.e., substitutions, insertions or deletions) are introduced into an IgG constant domain, or FcRn-binding fragment thereof (preferably an Fc or hinge-Fc domain fragment) to increase the half-life of the antibody in vivo. In some embodiments, the antibodies can have one or more amino acid mutations (e.g., substitutions) in the second constant (CH2) domain (residues 231-340 of human IgG1) and/or (e.g., and) the third constant (CH3) domain (residues 341-447 of human IgG1), with numbering according to the EU index in Kabat (Kabat E A et al., (1991) supra). In some embodiments, the constant region of the IgG1 of an antibody described herein comprises a methionine (M) to tyrosine (Y) substitution in position 252, a serine (S) to threonine (T) substitution in position 254, and a threonine (T) to glutamic acid (E) substitution in position 256, numbered according to the EU index as in Kabat. See U.S. Pat. No. 7,658,921, which is incorporated herein by reference. This type of mutant IgG, referred to as “YTE mutant” has been shown to display fourfold increased half-life as compared to wild-type versions of the same antibody (see Dall'Acqua W F et al., (2006) J Biol Chem 281: 23514-24). In some embodiments, an antibody comprises an IgG constant domain comprising one, two, three or more amino acid substitutions of amino acid residues at positions 251-257, 285-290, 308-314, 385-389, and 428-436, numbered according to the EU index as in Kabat.

[0162] In some embodiments, one, two or more amino acid substitutions are introduced into an IgG constant domain Fc region to alter the effector function(s) of the anti-TfR1 antibody. The effector ligand to which affinity is altered can be, for example, an Fc receptor or the C1 component of complement. This approach is described in further detail in U.S. Pat. Nos. 5,624,821 and 5,648,260. In some embodiments, the deletion or inactivation (through point mutations or other means) of a constant region domain can reduce Fc receptor binding of the circulating antibody thereby increasing tumor localization. Sec, e.g., U.S. Pat. Nos. 5,585,097 and 8,591,886 for a description of mutations that delete or inactivate the constant domain and thereby increase tumor localization. In some embodiments, one or more amino acid substitutions may be introduced into the Fc region of an antibody described herein to remove potential glycosylation sites on Fc region, which may reduce Fc receptor binding (see, e.g., Shields R L et al., (2001) J Biol Chem 276: 6591-604).

[0163] In some embodiments, one or more amino in the constant region of an anti-TfR1 antibody described herein can be replaced with a different amino acid residue such that the antibody has altered C1q binding and/or (e.g., and) reduced or abolished complement dependent cytotoxicity (CDC). This approach is described in further detail in U.S. Pat. No. 6,194,551 (Idusogie et al). In some embodiments, one or more amino acid residues in the N-terminal region of the CH2 domain of an antibody described herein are altered to thereby alter the ability of the antibody to fix complement. This approach is described further in International Publication No. WO 94/29351. In some embodiments, the Fc region of an antibody described herein is modified to increase the ability of the antibody to mediate antibody dependent cellular cytotoxicity (ADCC) and/or (e.g., and) to increase the affinity of the antibody for an Fcγ receptor. This approach is described further in International Publication No. WO 00/42072.

[0164] In some embodiments, the heavy and/or (e.g., and) light chain variable domain(s) sequence(s) of the antibodies provided herein can be used to generate, for example, CDR-grafted, chimeric, humanized, or composite human antibodies or antigen-binding fragments, as described elsewhere herein. As understood by one of ordinary skill in the art, any variant, CDR-grafted, chimeric, humanized, or composite antibodies derived from any of the antibodies provided herein may be useful in the compositions and methods described herein and will maintain the ability to specifically bind transferrin receptor, such that the variant, CDR-grafted, chimeric, humanized, or composite antibody has at least 50%, at least 60%, at least 70%, at least 80%, at least 90%, at least 95% or more binding to transferrin receptor relative to the original antibody from which it is derived.

[0165] In some embodiments, the antibodies provided herein comprise mutations that confer desirable properties to the antibodies. For example, to avoid potential complications due to Fab-arm exchange, which is known to occur with native IgG4 mAbs, the antibodies provided herein may comprise a stabilizing ‘Adair’ mutation (Angal S., et al., “A single amino acid substitution abolishes the heterogeneity of chimeric mouse/human (IgG4) antibody.” Mol Immunol 30, 105-108; 1993), where serine 228 (EU numbering; residue 241 Kabat numbering) is converted to proline resulting in an IgG1-like hinge sequence. Accordingly, any of the antibodies may include a stabilizing ‘Adair’ mutation.

[0166] In some embodiments, an antibody is modified, e.g., modified via glycosylation, phosphorylation, sumoylation, and/or (e.g., and) methylation. In some embodiments, an antibody is a glycosylated antibody, which is conjugated to one or more sugar or carbohydrate molecules. In some embodiments, the one or more sugar or carbohydrate molecule are conjugated to the antibody via N-glycosylation, O-glycosylation, C-glycosylation, glypiation (GPI anchor attachment), and/or (e.g., and) phosphoglycosylation. In some embodiments, the one or more sugar or carbohydrate molecules are monosaccharides, disaccharides, oligosaccharides, or glycans. In some embodiments, the one or more sugar or carbohydrate molecule is a branched oligosaccharide or a branched glycan. In some embodiments, the one or more sugar or carbohydrate molecule includes a mannose unit, a glucose unit, an N-acetylglucosamine unit, an N-acetylgalactosamine unit, a galactose unit, a fucose unit, or a phospholipid unit. In some embodiments, there are about 1-10, about 1-5, about 5-10, about 1-4, about 1-3, or about 2 sugar molecules. In some embodiments, a glycosylated antibody is fully or partially glycosylated. In some embodiments, an antibody is glycosylated by chemical reactions or by enzymatic means. In some embodiments, an antibody is glycosylated in vitro or inside a cell, which may optionally be deficient in an enzyme in the N- or O-glycosylation pathway, e.g., a glycosyltransferase. In some embodiments, an antibody is functionalized with sugar or carbohydrate molecules as described in International Patent Application Publication WO2014065661, published on May 1, 2014, entitled, “Modified antibody, antibody-conjugate and process for the preparation thereof”.

[0167] In some embodiments, any one of the anti-TfR1 antibodies described herein may comprise a signal peptide in the heavy and/or (e.g., and) light chain sequence (e.g., a N-terminal signal peptide). In some embodiments, the anti-TfR1 antibody described herein comprises any one of the VH and VL sequences, any one of the IgG heavy chain and light chain sequences, or any one of the F(ab′) heavy chain and light chain sequences described herein, and further comprises a signal peptide (e.g., a N-terminal signal peptide). In some embodiments, the signal peptide comprises the amino acid sequence of MGWSCIILFLVATATGVHS (SEQ ID NO: 104).

[0168] In some embodiments, an antibody provided herein may have one or more post-translational modifications. In some embodiments, N-terminal cyclization, also called pyroglutamate formation (pyro-Glu), may occur in the antibody during production. In some embodiments, pyroglutamate formation occurs in the antibody at N-terminal Glutamate (Glu) and/or Glutamine (Gln) residues during production. As such, it should be appreciated that an antibody specified as having a sequence comprising an N-terminal glutamate or glutamine residue encompasses antibodies that have undergone pyroglutamate formation resulting from a post-translational modification. In some embodiments, pyroglutamate formation occurs in a heavy chain sequence. In some embodiments, pyroglutamate formation occurs in a light chain sequence.

b. Other Muscle-Targeting Antibodies

[0169] In some embodiments, the muscle-targeting antibody is an antibody that specifically binds hemojuvelin, caveolin-3, Duchenne muscular dystrophy peptide, myosin IIb, or CD63. In some embodiments, the muscle-targeting antibody is an antibody that specifically binds a myogenic precursor protein. Exemplary myogenic precursor proteins include, without limitation, ABCG2, M-Cadherin/Cadherin-15, Caveolin-1, CD34, FoxK1, Integrin alpha 7, Integrin alpha 7 beta 1, MYF-5, MyoD, Myogenin, NCAM-1/CD56, Pax3, Pax7, and Pax9. In some embodiments, the muscle-targeting antibody is an antibody that specifically binds a skeletal muscle protein. Exemplary skeletal muscle proteins include, without limitation, alpha-Sarcoglycan, beta-Sarcoglycan, Calpain Inhibitors, Creatine Kinase MM/CKMM, cIF5A, Enolase 2/Neuron-specific Enolase, epsilon-Sarcoglycan, FABP3/H-FABP, GDF-8/Myostatin, GDF-11/GDF-8, Integrin alpha 7, Integrin alpha 7 beta 1, Integrin beta 1/CD29, MCAM/CD146, MyoD, Myogenin, Myosin Light Chain Kinase Inhibitors, NCAM-1/CD56, and Troponin I. In some embodiments, the muscle-targeting antibody is an antibody that specifically binds a smooth muscle protein. Exemplary smooth muscle proteins include, without limitation, alpha-Smooth Muscle Actin, VE-Cadherin, Caldesmon/CALD1, Calponin 1, Desmin, Histamine H2 R, Motilin R/GPR38, Transgelin/TAGLN, and Vimentin. However, it should be appreciated that antibodies to additional targets are within the scope of this disclosure and the exemplary lists of targets provided herein are not meant to be limiting.

c. Antibody Features/Alterations

[0170] In some embodiments, conservative mutations can be introduced into antibody sequences (e.g., CDRs or framework sequences) at positions where the residues are not likely to be involved in interacting with a target antigen (e.g., transferrin receptor), for example, as determined based on a crystal structure. In some embodiments, one, two or more mutations (e.g., amino acid substitutions) are introduced into the Fc region of a muscle-targeting antibody described herein (e.g., in a CH2 domain (residues 231-340 of human IgG1) and/or (e.g., and) CH3 domain (residues 341-447 of human IgG1) and/or (e.g., and) the hinge region, with numbering according to the Kabat numbering system (e.g., the EU index in Kabat)) to alter one or more functional properties of the antibody, such as serum half-life, complement fixation, Fc receptor binding and/or (e.g., and) antigen-dependent cellular cytotoxicity.

[0171] In some embodiments, one, two or more mutations (e.g., amino acid substitutions) are introduced into the hinge region of the Fc region (CH1 domain) such that the number of cysteine residues in the hinge region are altered (e.g., increased or decreased) as described in, e.g., U.S. Pat. No. 5,677,425. The number of cysteine residues in the hinge region of the CH1 domain can be altered to, e.g., facilitate assembly of the light and heavy chains, or to alter (e.g., increase or decrease) the stability of the antibody or to facilitate linker conjugation.

[0172] In some embodiments, one, two or more mutations (e.g., amino acid substitutions) are introduced into the Fc region of a muscle-targeting antibody described herein (e.g., in a CH2 domain (residues 231-340 of human IgG1) and/or (e.g., and) CH3 domain (residues 341-447 of human IgG1) and/or (e.g., and) the hinge region, with numbering according to the Kabat numbering system (e.g., the EU index in Kabat)) to increase or decrease the affinity of the antibody for an Fc receptor (e.g., an activated Fc receptor) on the surface of an effector cell. Mutations in the Fc region of an antibody that decrease or increase the affinity of an antibody for an Fc receptor and techniques for introducing such mutations into the Fc receptor or fragment thereof are known to one of skill in the art. Examples of mutations in the Fc receptor of an antibody that can be made to alter the affinity of the antibody for an Fc receptor are described in, e.g., Smith P et al., (2012) PNAS 109: 6181-6186, U.S. Pat. No. 6,737,056, and International Publication Nos. WO 02/060919; WO 98/23289; and WO 97/34631, which are incorporated herein by reference.

[0173] In some embodiments, one, two or more amino acid mutations (i.e., substitutions, insertions or deletions) are introduced into an IgG constant domain, or FcRn-binding fragment thereof (preferably an Fc or hinge-Fc domain fragment) to alter (e.g., decrease or increase) half-life of the antibody in vivo. See, e.g., International Publication Nos. WO 02/060919; WO 98/23289; and WO 97/34631; and U.S. Pat. Nos. 5,869,046, 6,121,022, 6,277,375 and 6,165,745 for examples of mutations that will alter (e.g., decrease or increase) the half-life of an antibody in vivo.

[0174] In some embodiments, one, two or more amino acid mutations (i.e., substitutions, insertions or deletions) are introduced into an IgG constant domain, or FcRn-binding fragment thereof (preferably an Fc or hinge-Fc domain fragment) to decrease the half-life of the anti-transferrin receptor antibody in vivo. In some embodiments, one, two or more amino acid mutations (i.e., substitutions, insertions or deletions) are introduced into an IgG constant domain, or FcRn-binding fragment thereof (preferably an Fc or hinge-Fc domain fragment) to increase the half-life of the antibody in vivo. In some embodiments, the antibodies can have one or more amino acid mutations (e.g., substitutions) in the second constant (CH2) domain (residues 231-340 of human IgG1) and/or (e.g., and) the third constant (CH3) domain (residues 341-447 of human IgG1), with numbering according to the EU index in Kabat (Kabat E A et al., (1991) supra). In some embodiments, the constant region of the IgG1 of an antibody described herein comprises a methionine (M) to tyrosine (Y) substitution in position 252, a serine (S) to threonine (T) substitution in position 254, and a threonine (T) to glutamic acid (E) substitution in position 256, numbered according to the EU index as in Kabat. See U.S. Pat. No. 7,658,921, which is incorporated herein by reference. This type of mutant IgG, referred to as “YTE mutant” has been shown to display fourfold increased half-life as compared to wild-type versions of the same antibody (see Dall'Acqua W F et al., (2006) J Biol Chem 281: 23514-24). In some embodiments, an antibody comprises an IgG constant domain comprising one, two, three or more amino acid substitutions of amino acid residues at positions 251-257, 285-290, 308-314, 385-389, and 428-436, numbered according to the EU index as in Kabat.

[0175] In some embodiments, one, two or more amino acid substitutions are introduced into an IgG constant domain Fc region to alter the effector function(s) of the anti-transferrin receptor antibody. The effector ligand to which affinity is altered can be, for example, an Fc receptor or the C1 component of complement. This approach is described in further detail in U.S. Pat. Nos. 5,624,821 and 5,648,260. In some embodiments, the deletion or inactivation (through point mutations or other means) of a constant region domain can reduce Fc receptor binding of the circulating antibody thereby increasing tumor localization. Sec, e.g., U.S. Pat. Nos. 5,585,097 and 8,591,886 for a description of mutations that delete or inactivate the constant domain and thereby increase tumor localization. In some embodiments, one or more amino acid substitutions may be introduced into the Fc region of an antibody described herein to remove potential glycosylation sites on Fc region, which may reduce Fc receptor binding (see, e.g., Shields R L et al., (2001) J Biol Chem 276: 6591-604).

[0176] In some embodiments, one or more amino in the constant region of a muscle-targeting antibody described herein can be replaced with a different amino acid residue such that the antibody has altered C1q binding and/or (e.g., and) reduced or abolished complement dependent cytotoxicity (CDC). This approach is described in further detail in U.S. Pat. No. 6,194,551 (Idusogie et al). In some embodiments, one or more amino acid residues in the N-terminal region of the CH2 domain of an antibody described herein are altered to thereby alter the ability of the antibody to fix complement. This approach is described further in International Publication No. WO 94/29351. In some embodiments, the Fc region of an antibody described herein is modified to increase the ability of the antibody to mediate antibody dependent cellular cytotoxicity (ADCC) and/or (e.g., and) to increase the affinity of the antibody for an Fcγ receptor. This approach is described further in International Publication No. WO 00/42072.

[0177] In some embodiments, the heavy and/or (e.g., and) light chain variable domain(s) sequence(s) of the antibodies provided herein can be used to generate, for example, CDR-grafted, chimeric, humanized, or composite human antibodies or antigen-binding fragments, as described elsewhere herein. As understood by one of ordinary skill in the art, any variant, CDR-grafted, chimeric, humanized, or composite antibodies derived from any of the antibodies provided herein may be useful in the compositions and methods described herein and will maintain the ability to specifically bind transferrin receptor, such that the variant, CDR-grafted, chimeric, humanized, or composite antibody has at least 50%, at least 60%, at least 70%, at least 80%, at least 90%, at least 95% or more binding to transferrin receptor relative to the original antibody from which it is derived.

[0178] In some embodiments, the antibodies provided herein comprise mutations that confer desirable properties to the antibodies. For example, to avoid potential complications due to Fab-arm exchange, which is known to occur with native IgG4 mAbs, the antibodies provided herein may comprise a stabilizing ‘Adair’ mutation (Angal S., et al., “A single amino acid substitution abolishes the heterogeneity of chimeric mouse/human (IgG4) antibody,” Mol Immunol 30, 105-108; 1993), where serine 228 (EU numbering; residue 241 Kabat numbering) is converted to proline resulting in an IgG1-like hinge sequence. Accordingly, any of the antibodies may include a stabilizing ‘Adair’ mutation.

[0179] As provided herein, antibodies of this disclosure may optionally comprise constant regions or parts thereof. For example, a VL domain may be attached at its C-terminal end to a light chain constant domain like Cκ or Cλ. Similarly, a VH domain or portion thereof may be attached to all or part of a heavy chain like IgA, IgD, IgE, IgG, and IgM, and any isotype subclass. Antibodies may include suitable constant regions (see, for example, Kabat et al., Sequences of Proteins of Immunological Interest, No. 91-3242, National Institutes of Health Publications, Bethesda, Md. (1991)). Therefore, antibodies within the scope of this may disclosure include VH and VL domains, or an antigen binding portion thereof, combined with any suitable constant regions.

ii. Muscle-Targeting Peptides

[0180] Some aspects of the disclosure provide muscle-targeting peptides as muscle-targeting agents. Short peptide sequences (e.g., peptide sequences of 5-20 amino acids in length) that bind to specific cell types have been described. For example, cell-targeting peptides have been described in Vines c., et al., A. “Cell-penetrating and cell-targeting peptides in drug delivery” Biochim Biophys Acta 2008, 1786: 126-38; Jarver P., et al., “In vivo biodistribution and efficacy of peptide mediated delivery” Trends Pharmacol Sci 2010; 31: 528-35; Samoylova T. I., et al., “Elucidation of muscle-binding peptides by phage display screening” Muscle Nerve 1999; 22: 460-6; U.S. Pat. No. 6,329,501, issued on Dec. 11, 2001, entitled “METHODS AND COMPOSITIONS FOR TARGETING COMPOUNDS TO MUSCLE”; and Samoylov A. M., et al., “Recognition of cell-specific binding of phage display derived peptides using an acoustic wave sensor.” Biomol Eng 2002; 18: 269-72; the entire contents of each of which are incorporated herein by reference. By designing peptides to interact with specific cell surface antigens (e.g., receptors), selectivity for a desired tissue, e.g., muscle, can be achieved. Skeletal muscle-targeting has been investigated and a range of molecular payloads are able to be delivered. These approaches may have high selectivity for muscle tissue without many of the practical disadvantages of a large antibody or viral particle. Accordingly, in some embodiments, the muscle-targeting agent is a muscle-targeting peptide that is from 4 to 50 amino acids in length. In some embodiments, the muscle-targeting peptide is 4, 5, 6, 7, 8, 9, 10, 11, 12, 13, 14, 15, 16, 17, 18, 19, 20, 21, 22, 23, 24, 25, 26, 27, 28, 29, 30, 31, 32, 33, 34, 35, 36, 37, 38, 39, 40, 41, 42, 43, 44, 45, 46, 47, 48, 49, or 50 amino acids in length. Muscle-targeting peptides can be generated using any of several methods, such as phage display.

[0181] In some embodiments, a muscle-targeting peptide may bind to an internalizing cell surface receptor that is overexpressed or relatively highly expressed in muscle cells, e.g., a transferrin receptor, compared with certain other cells. In some embodiments, a muscle-targeting peptide may target, e.g., bind to, a transferrin receptor. In some embodiments, a peptide that targets a transferrin receptor may comprise a segment of a naturally occurring ligand, e.g., transferrin. In some embodiments, a peptide that targets a transferrin receptor is as described in U.S. Pat. No. 6,743,893, filed Nov. 30, 2000, “RECEPTOR-MEDIATED UPTAKE OF PEPTIDES THAT BIND THE HUMAN TRANSFERRIN RECEPTOR”. In some embodiments, a peptide that targets a transferrin receptor is as described in Kawamoto, M. et al, “A novel transferrin receptor-targeted hybrid peptide disintegrates cancer cell membrane to induce rapid killing of cancer cells.” BMC Cancer. 2011 Aug. 18; 11:359. In some embodiments, a peptide that targets a transferrin receptor is as described in U.S. Pat. No. 8,399,653, filed May 20, 2011. “TRANSFERRIN/TRANSFERRIN RECEPTOR-MEDIATED SIRNA DELIVERY”

[0182] As discussed above, examples of muscle targeting peptides have been reported. For example, muscle-specific peptides were identified using phage display library presenting surface heptapeptides. As one example a peptide having the amino acid sequence ASSLNIA (SEQ ID NO: 130) bound to C2C12 murine myotubes in vitro, and bound to mouse muscle tissue in vivo. Accordingly, in some embodiments, the muscle-targeting agent comprises the amino acid sequence ASSLNIA (SEQ ID NO: 130). This peptide displayed improved specificity for binding to heart and skeletal muscle tissue after intravenous injection in mice with reduced binding to liver, kidney, and brain. Additional muscle-specific peptides have been identified using phage display. For example, a 12 amino acid peptide was identified by phage display library for muscle targeting in the context of treatment for DMD. Sec, Yoshida D., et al . . . “Targeting of salicylate to skin and muscle following topical injections in rats.” Int J Pharm 2002; 231: 177-84; the entire contents of which are hereby incorporated by reference. Here, a 12 amino acid peptide having the sequence SKTFNTHPQSTP (SEQ ID NO: 131) was identified and this muscle-targeting peptide showed improved binding to C2C12 cells relative to the ASSLNIA (SEQ ID NO: 130) peptide.

[0183] An additional method for identifying peptides selective for muscle (e.g., skeletal muscle) over other cell types includes in vitro selection, which has been described in Ghosh D., et al., “Selection of muscle-binding peptides from context-specific peptide-presenting phage libraries for adenoviral vector targeting” J Virol 2005; 79: 13667-72; the entire contents of which are incorporated herein by reference. By pre-incubating a random 12-mer peptide phage display library with a mixture of non-muscle cell types, non-specific cell binders were selected out. Following rounds of selection the 12 amino acid peptide TARGEHKEEELI (SEQ ID NO: 254) appeared most frequently. Accordingly, in some embodiments, the muscle-targeting agent comprises the amino acid sequence TARGEHKEEELI (SEQ ID NO: 254).

[0184] A muscle-targeting agent may an amino acid-containing molecule or peptide. A muscle-targeting peptide may correspond to a sequence of a protein that preferentially binds to a protein receptor found in muscle cells. In some embodiments, a muscle-targeting peptide contains a high propensity of hydrophobic amino acids, e.g., valine, such that the peptide preferentially targets muscle cells. In some embodiments, a muscle-targeting peptide has not been previously characterized or disclosed. These peptides may be conceived of, produced, synthesized, and/or (e.g., and) derivatized using any of several methodologies, e.g., phage displayed peptide libraries, one-bead one-compound peptide libraries, or positional scanning synthetic peptide combinatorial libraries. Exemplary methodologies have been characterized in the art and are incorporated by reference (Gray, B. P. and Brown, K. C. “Combinatorial Peptide Libraries: Mining for Cell-Binding Peptides” Chem Rev. 2014, 114:2, 1020-1081; Samoylova, T. I. and Smith, B. F. “Elucidation of muscle-binding peptides by phage display screening.” Muscle Nerve, 1999, 22:4. 460-6). In some embodiments, a muscle-targeting peptide has been previously disclosed (see, e.g., Writer M. J. et al. “Targeted gene delivery to human airway epithelial cells with synthetic vectors incorporating novel targeting peptides selected by phage display.” J. Drug Targeting. 2004; 12:185; Cai. D. “BDNF-mediated enhancement of inflammation and injury in the aging heart.” Physiol Genomics. 2006, 24:3, 191-7; Zhang. L. “Molecular profiling of heart endothelial cells.” Circulation, 2005, 112:11, 1601-11; McGuire, M. J. et al. “In vitro selection of a peptide with high selectivity for cardiomyocytes in vivo.” J Mol Biol. 2004, 342:1, 171-82). Exemplary muscle-targeting peptides comprise an amino acid sequence of the following group: CQAQGQLVC (SEQ ID NO: 11108), CSERSMNFC (SEQ ID NO: 11109), CPKTRRVPC (SEQ ID NO: 11110), WLSEAGPVVTVRALRGTGSW (SEQ ID NO: 11111), ASSLNIA (SEQ ID NO: 130), CMQHSMRVC (SEQ ID NO: 11112), and DDTRHWG (SEQ ID NO: 11113). In some embodiments, a muscle-targeting peptide may comprise about 2-25 amino acids, about 2-20 amino acids, about 2-15 amino acids, about 2-10 amino acids, or about 2-5 amino acids. Muscle-targeting peptides may comprise naturally occurring amino acids, e.g., cysteine, alanine, or non-naturally occurring or modified amino acids. Non-naturally occurring amino acids include ß-amino acids, homo-amino acids, proline derivatives, 3-substituted alanine derivatives, linear core amino acids, N-methyl amino acids, and others known in the art. In some embodiments, a muscle-targeting peptide may be linear; in other embodiments, a muscle-targeting peptide may be cyclic, e.g., bicyclic (see, e.g., Silvana, M. G. et al. Mol. Therapy, 2018, 26:1, 132-147).

iii. Muscle-Targeting Receptor Ligands

[0185] A muscle-targeting agent may be a ligand, e.g., a ligand that binds to a receptor protein. A muscle-targeting ligand may be a protein, e.g., transferrin, which binds to an internalizing cell surface receptor expressed by a muscle cell. Accordingly, in some embodiments, the muscle-targeting agent is transferrin, or a derivative thereof that binds to a transferrin receptor. A muscle-targeting ligand may alternatively be a small molecule, e.g., a lipophilic small molecule that preferentially targets muscle cells relative to other cell types. Exemplary lipophilic small molecules that may target muscle cells include compounds comprising cholesterol, cholesteryl, stearic acid, palmitic acid, oleic acid, oleyl, linolene, linoleic acid, myristic acid, sterols, dihydrotestosterone, testosterone derivatives, glycerine, alkyl chains, trityl groups, and alkoxy acids.

iv. Muscle-Targeting Aptamers

[0186] A muscle-targeting agent may be an aptamer, e.g., an RNA aptamer, which preferentially targets muscle cells relative to other cell types. In some embodiments, a muscle-targeting aptamer has not been previously characterized or disclosed. These aptamers may be conceived of, produced, synthesized, and/or (e.g., and) derivatized using any of several methodologies, e.g., Systematic Evolution of Ligands by Exponential Enrichment. Exemplary methodologies have been characterized in the art and are incorporated by reference (Yan, A. C. and Levy, M. “Aptamers and aptamer targeted delivery” RNA biology, 2009, 6:3, 316-20; Germer, K. et al. “RNA aptamers and their therapeutic and diagnostic applications.” Int. J. Biochem. Mol. Biol. 2013; 4: 27-40). In some embodiments, a muscle-targeting aptamer has been previously disclosed (see, e.g., Phillippou, S. et al. “Selection and Identification of Skeletal-Muscle-Targeted RNA Aptamers.” Mol Ther Nucleic Acids. 2018, 10:199-214; Thiel, W. H. et al. “Smooth Muscle Cell-targeted RNA Aptamer Inhibits Neointimal Formation.” Mol Ther. 2016, 24:4, 779-87). Exemplary muscle-targeting aptamers include the A01B RNA aptamer and RNA Apt 14. In some embodiments, an aptamer is a nucleic acid-based aptamer, an oligonucleotide aptamer or a peptide aptamer. In some embodiments, an aptamer may be about 5-15 kDa, about 5-10 kDa, about 10-15 kDa, about 1-5 Da, about 1-3 kDa, or smaller.

v. Other Muscle-Targeting Agents

[0187] One strategy for targeting a muscle cell (e.g., a skeletal muscle cell) is to use a substrate of a muscle transporter protein, such as a transporter protein expressed on the sarcolemma. In some embodiments, the muscle-targeting agent is a substrate of an influx transporter that is specific to muscle tissue. In some embodiments, the influx transporter is specific to skeletal muscle tissue. Two main classes of transporters are expressed on the skeletal muscle sarcolemma, (1) the adenosine triphosphate (ATP) binding cassette (ABC) superfamily, which facilitate efflux from skeletal muscle tissue and (2) the solute carrier (SLC) superfamily, which can facilitate the influx of substrates into skeletal muscle. In some embodiments, the muscle-targeting agent is a substrate that binds to an ABC superfamily or an SLC superfamily of transporters. In some embodiments, the substrate that binds to the ABC or SLC superfamily of transporters is a naturally occurring substrate. In some embodiments, the substrate that binds to the ABC or SLC superfamily of transporters is a non-naturally occurring substrate, for example, a synthetic derivative thereof that binds to the ABC or SLC superfamily of transporters.

[0188] In some embodiments, the muscle-targeting agent is any muscle targeting agent described herein (e.g., antibodies, nucleic acids, small molecules, peptides, aptamers, lipids, sugar moieties) that target SLC superfamily of transporters. In some embodiments, the muscle-targeting agent is a substrate of an SLC superfamily of transporters. SLC transporters are either equilibrative or use proton or sodium ion gradients created across the membrane to drive transport of substrates. Exemplary SLC transporters that have high skeletal muscle expression include, without limitation, the SATT transporter (ASCT1; SLC1A4), GLUT4 transporter (SLC2A4), GLUT7 transporter (GLUT7; SLC2A7), ATRC2 transporter (CAT-2; SLC7A2), LAT3 transporter (KIAA0245; SLC7A6), PHT1 transporter (PTR4; SLC15A4), OATP-J transporter (OATP5A1; SLC21A15), OCT3 transporter (EMT; SLC22A3), OCTN2 transporter (FLJ46769; SLC22A5), ENT transporters (ENT1; SLC29A1 and ENT2; SLC29A2), PAT2 transporter (SLC36A2), and SAT2 transporter (KIAA1382; SLC38A2). These transporters can facilitate the influx of substrates into skeletal muscle, providing opportunities for muscle targeting.

[0189] In some embodiments, the muscle-targeting agent is a substrate of an equilibrative nucleoside transporter 2 (ENT2) transporter. Relative to other transporters, ENT2 has one of the highest mRNA expressions in skeletal muscle. While human ENT2 (hENT2) is expressed in most body organs such as brain, heart, placenta, thymus, pancreas, prostate, and kidney, it is especially abundant in skeletal muscle. Human ENT2 facilitates the uptake of its substrates depending on their concentration gradient. ENT2 plays a role in maintaining nucleoside homeostasis by transporting a wide range of purine and pyrimidine nucleobases. The hENT2 transporter has a low affinity for all nucleosides (adenosine, guanosine, uridine, thymidine, and cytidine) except for inosine. Accordingly, in some embodiments, the muscle-targeting agent is an ENT2 substrate. Exemplary ENT2 substrates include, without limitation, inosine, 2′,3′-dideoxyinosine, and calofarabine. In some embodiments, any of the muscle-targeting agents provided herein are associated with a molecular payload (e.g., oligonucleotide payload). In some embodiments, the muscle-targeting agent is covalently linked to the molecular payload. In some embodiments, the muscle-targeting agent is non-covalently linked to the molecular payload.

[0190] In some embodiments, the muscle-targeting agent is a substrate of an organic cation/carnitine transporter (OCTN2), which is a sodium ion-dependent, high affinity carnitine transporter. In some embodiments, the muscle-targeting agent is carnitine, mildronate, acetylcarnitine, or any derivative thereof that binds to OCTN2. In some embodiments, the carnitine, mildronate, acetylcarnitine, or derivative thereof is covalently linked to the molecular payload (e.g., oligonucleotide payload).

[0191] A muscle-targeting agent may be a protein that is protein that exists in at least one soluble form that targets muscle cells. In some embodiments, a muscle-targeting protein may be hemojuvelin (also known as repulsive guidance molecule C or hemochromatosis type 2 protein), a protein involved in iron overload and homeostasis. In some embodiments, hemojuvelin may be full length or a fragment, or a mutant with at least 75%, at least 80%, at least 85%, at least 90%, at least 95%, at least 98% or at least 99% sequence identity to a functional hemojuvelin protein. In some embodiments, a hemojuvelin mutant may be a soluble fragment, may lack a N-terminal signaling, and/or (e.g., and) lack a C-terminal anchoring domain. In some embodiments, hemojuvelin may be annotated under GenBank RefSeq Accession Numbers NM_001316767.1, NM_145277.4, NM_202004.3, NM_213652.3, or NM_213653.3. It should be appreciated that a hemojuvelin may be of human, non-human primate, or rodent origin.

### B. Molecular Payloads

[0192] Some aspects of the disclosure provide molecular payloads, e.g., oligonucleotides designed to target GYS1 RNAs to modulate the expression or the activity of GYS1. In some embodiments, the disclosure provides oligonucleotides complementary with GYS1 RNA that are useful for reducing levels of GYS1 mRNA and/or protein associated with features of Pompe disease (PD) pathology, including build-up of glycogen in muscle cells, which leads to progressive muscle weakness, reduced muscle tone (hypotonia), cardiac enlargement, and difficulty breathing. In some embodiments, the oligonucleotides provided herein are designed to direct RNAi mediated degradation of GYS1 RNA. In some embodiments, the oligonucleotides are designed to efficiently engage the RNA-induced silencing complex (RISC) for degradation of the GYS1 RNA but also have reduced off-target effect. In some embodiments, the oligonucleotides are designed to have desirable bioavailability and/or serum-stability properties. In some embodiments, the oligonucleotides are designed to have desirable binding affinity properties. In some embodiments, the oligonucleotides are designed to have desirable toxicity and/or immunogenicity profiles.

[0193] In some embodiments, the GYS1-targeting oligonucleotide comprises a strand having a region of complementarity to a GYS1 RNA. Exemplary oligonucleotides are described in further detail herein, however, it should be appreciated that the exemplary oligonucleotides provided herein are not meant to be limiting.

i. Oligonucleotides

[0194] In some embodiments, the GYS1-targeting oligonucleotides designed to cause RNAi mediated degradation of GYS1 mRNA. In some embodiments, the GYS1-targeting oligonucleotide provided herein comprises an antisense strand that is complementary to a GYS1 mRNA. In some embodiments, the oligonucleotide provided herein further comprises a sense strand that forms a double-stranded oligonucleotide (e.g., siRNA). It should be appreciated that, in some embodiments, oligonucleotides in one format (e.g., antisense oligonucleotides) may be suitably adapted to another format (e.g., siRNA oligonucleotides) by incorporating functional sequences (e.g., antisense strand sequences) from one format to the other format.

[0195] In some embodiments, an oligonucleotide, such as an RNAi or antisense oligonucleotide, is utilized to suppress expression of wild-type GYS1 in muscle cells, as reported, for example, in Clayton, et al., “Antisense Oligonucleotide-mediated Suppression of Muscle Glycogen Synthase 1 Synthesis as an Approach for Substrate Reduction Therapy of Pompe Disease,” published in Mol Ther Nucleic Acids in 2017, or US Patent Application Publication Number 2017182189, published on Jun. 29, 2017, entitled “INHIBITING OR DOWNREGULATING GLYCOGEN SYNTHASE BY CREATING PREMATURE STOP CODONS USING ANTISENSE OLIGONUCLEOTIDES”, the contents of which are incorporated herein by reference. Accordingly, in some embodiments, oligonucleotides may have an antisense strand having a region of complementarity to a human GYS1 sequence, corresponding to RefSeq number NM_002103.4 (SEQ ID NO: 160), a mouse GYS1 sequence, corresponding to RefSeq number NM_030678.3 (SEQ ID NO: 161), and/or a Macaca fascicularis (cynomolgus) GYS1 sequence, corresponding to RefSeq number XM_005589837.2 (SEQ ID NO: 241), as below.

Human GYS1 (NM_002103.4):
(SEQ ID NO: 160)
TCCTGGCGGCTGCGAGGTTTCACTGCAGGGGCGCCAGTGGGCTCA
GTGACGCTGCGGCCTCCTTCTGCCTAGGTCCCAACGCTTCGGGGC
AGGGGTGCGGTCTTGCAATAGGAAGCCGAGCGTCTTGCAAGCTTC
CCGTCGGGCACCAGCTACTCGGCCCCGCACCCTACCTGGTGCATT
CCCTAGACACCTCCGGGGTCCCTACCTGGAGATCCCCGGAGCCCC
CCTTCCTGCGCCAGCCATGCCTTTAAACCGCACTTTGTCCATGTC
CTCACTGCCAGGACTGGAGGACTGGGAGGATGAATTCGACCTGGA
GAACGCAGTGCTCTTCGAAGTGGCCTGGGAGGTGGCTAACAAGGT
GGGTGGCATCTACACGGTGCTGCAGACGAAGGCGAAGGTGACAGG
GGACGAATGGGGCGACAACTACTTCCTGGTGGGGCCGTACACGGA
GCAGGGCGTGAGGACCCAGGTGGAACTGCTGGAGGCCCCCACCCC
GGCCCTGAAGAGGACACTGGATTCCATGAACAGCAAGGGCTGCAA
GGTGTATTTCGGGCGCTGGCTGATCGAGGGAGGCCCTCTGGTGGT
GCTCCTGGACGTGGGTGCCTCAGCTTGGGCCCTGGAGCGCTGGAA
GGGAGAGCTCTGGGATACCTGCAACATCGGAGTGCCGTGGTACGA
CCGCGAGGCCAACGACGCTGTCCTCTTTGGCTTTCTGACCACCTG
GTTCCTGGGTGAGTTCCTGGCACAGAGTGAGGAGAAGCCACATGT
GGTTGCTCACTTCCATGAGTGGTTGGCAGGCGTTGGACTCTGCCT
GTGTCGTGCCCGGCGACTGCCTGTAGCAACCATCTTCACCACCCA
TGCCACGCTGCTGGGGCGCTACCTGTGTGCCGGTGCCGTGGACTT
CTACAACAACCTGGAGAACTTCAACGTGGACAAGGAAGCAGGGGA
GAGGCAGATCTACCACCGATACTGCATGGAAAGGGCGGCAGCCCA
CTGCGCTCACGTCTTCACTACTGTGTCCCAGATCACCGCCATCGA
GGCACAGCACTTGCTCAAGAGGAAACCAGATATTGTGACCCCCAA
TGGGCTGAATGTGAAGAAGTTTTCTGCCATGCATGAGTTCCAGAA
CCTCCATGCTCAGAGCAAGGCTCGAATCCAGGAGTTTGTGCGGGG
CCATTTTTATGGGCATCTGGACTTCAACTTGGACAAGACCTTATA
CTTCTTTATCGCCGGCCGCTATGAGTTCTCCAACAAGGGTGCTGA
CGTCTTCCTGGAGGCATTGGCTCGGCTCAACTATCTGCTCAGAGT
GAACGGCAGCGAGCAGACAGTGGTTGCCTTCTTCATCATGCCAGC
GCGGACCAACAATTTCAACGTGGAAACCCTCAAAGGCCAAGCTGT
GCGCAAACAGCTTTGGGACACGGCCAACACGGTGAAGGAAAAGTT
CGGGAGGAAGCTTTATGAATCCTTACTGGTTGGGAGCCTTCCCGA
CATGAACAAGATGCTGGATAAGGAAGACTTCACTATGATGAAGAG
AGCCATCTTTGCAACGCAGCGGCAGTCTTTCCCCCCTGTGTGCAC
CCACAATATGCTGGATGACTCCTCAGACCCCATCCTGACCACCAT
CCGCCGAATCGGCCTCTTCAATAGCAGTGCCGACAGGGTGAAGGT
GATTTTCCACCCGGAGTTCCTCTCCTCCACAAGCCCCCTGCTCCC
TGTGGACTATGAGGAGTTTGTCCGTGGCTGTCACCTTGGAGTCTT
CCCCTCCTACTATGAGCCTTGGGGCTACACACCGGCTGAGTGCAC
GGTTATGGGAATCCCCAGTATCTCCACCAATCTCTCCGGCTTCGG
CTGCTTCATGGAGGAACACATCGCAGACCCCTCAGCTTACGGTAT
CTACATTCTTGACCGGCGGTTCCGCAGCCTGGATGATTCCTGCTC
GCAGCTCACCTCCTTCCTCTACAGTTTCTGTCAGCAGAGCCGGCG
GCAGCGTATCATCCAGCGGAACCGCACGGAGCGCCTCTCCGACCT
TCTGGACTGGAAATACCTAGGCCGGTACTATATGTCTGCGCGCCA
CATGGCGCTGTCCAAGGCCTTTCCAGAGCACTTCACCTACGAGCC
CAACGAGGCGGATGCGGCCCAGGGGTACCGCTACCCACGGCCAGC
CTCGGTGCCACCGTCGCCCTCGCTGTCACGACACTCCAGCCCGCA
CCAGAGTGAGGACGAGGAGGATCCCCGGAACGGGCCGCTGGAGGA
AGACGGCGAGCGCTACGATGAGGACGAGGAGGCCGCCAAGGACCG
GCGCAACATCCGTGCACCAGAGTGGCCGCGCCGAGCGTCCTGCAC
CTCCTCCACCAGCGGCAGCAAGCGCAACTCTGTGGACACGGCCAC
CTCCAGCTCACTCAGCACCCCGAGCGAGCCCCTCAGCCCCACCAG
CTCCCTGGGCGAGGAGCGTAACTAAGTCCGCCCCACCACACTCCC
CGCCTGTCCTGCCTCTCTGCTCCAGAGAGAGGATGCAGAGGGGTG
CTGCTCCTAAACCCCCGCTCCAGATCTGCACTGGGTGTGGCCCCG
CAGTGCCCCCACCCAGTCCGCCAAACACTCCACCCCCTCCAGCTC
CAGTTTCCAAGTTCCTGCACTCCAGAATCCACAAAGCCGTGCCTT
TCTCTGGCTCCAGAATATGCATAATCAGCGCCCTGGAGTCCCCTG
GGCCTGGACCGCTTCCCAGAGGCCAGGAATCTGCCATTACTCTGC
GGTGGTGCCAGAGGTTTTAGGAAACCTGGCATGGTGCTTTCAGGT
CTGGGGCTTTTAGAGCCCCCCGTGTGGCTTACAAATTCTACAGCA
TACAGAGCAGGCCACGCTCAGGCCCGGCATGCGGGCCACCAAGTT
CTGGAAACCACGTGGTGTCCCTGCGAATGGGGCGATCAAGTCCAG
AGCCGGGGCACTTTCAGAGTTTGAAGGTAACTGAGAGCAGATGGT
CCTCCATTTCAACTCCAGAAGTGGGGCTCTGGGAGGGATGTTCTA
GCCCTCCCTGGCATGTCAGAGCCAGGCTCTGCCTGGAGGATCCCT
CCATCCGGCTCCTGTCATCCCCTACACTTTGGCCAAGCAAGAGGT
GGTAGAACCACTTGGCTGCTCATTCCTTCTGGAGGACACACAGTC
TCAGTCCAGATGCCTTCCTGTCTTTCTGGCCCTTTCTGGACCAGA
TCCTACTCTTCCTTTCTAAATCTGAGATCTCCCTCCAGGGAATCC
GCCTGCAGAGGACAGAGCTGGCTGTCTTCCCCCACCCCTAACCTG
GCTTATTCCCAACTGCTCTGCCCACTGTGAAACCACTAGGTTCTA
GGTCCTGGCTTCTAGATCTGGAACCTTACCACGTTACTGCATACT
GATCCCTTTCCCATGATCCAGAACTGAGGTCACTGGGTTCTAGAA
CCCCCACATTTACCTCGAGGCTCTTCCATCCCCAAACTGTGCCCT
GCCTTCAGCTTTGGTGAAAGGGAGGGCCCCTCATGTGTGCTGTGC
TGTGTCTGCACCGCTTGGTTTGCAGTTGAGAGGGGAGGGCAGGAG
GGGTGTGATTGGAGTGTGTCCGGAGATGAGATGAAAAAAATACAT
CTATATTTAAGAATCCCAAAAAAAAAAAAAAAAAA
Mouse GYS1 (NM_030678.3):
(SEQ ID NO: 161)
ACTGCAGCTGCCCGCCCGATTCAGTGTCTCAGCTCACCCTACCTG
AGTCGGAGCGCTCTGGGGCGGGGGTGCGGTCGTGCAATAGGAAGC
GGAGCGCCTTGCAAGCTTCCCCTGGGACACCCGCTAACTCTACCG
GTCACCAAGTCTGCTGCGTTCCCAGCCGATCTCTCTGGTTTCCAG
TTTTGGTGCTCGAAGTCCCCTGCCCGCAGTAGCCATGCCTCTCAG
CCGCAGTCTCTCTGTGTCCTCGCTTCCAGGATTGGAAGACTGGGA
GGATGAATTCGACCCCGAGAACGCAGTGCTTTTCGAGGTGGCCTG
GGAGGTGGCCAACAAGGTGGGTGGCATCTACACTGTGCTGCAGAC
GAAGGCGAAGGTGACAGGGGATGAATGGGGTGACAACTACTATCT
GGTGGGACCATACACGGAGCAGGGTGTGAGGACGCAGGTAGAGCT
CCTGGAGCCCCCAACTCCGGAACTGAAGAGGACTTTGGATTCCAT
GAACAGCAAGGGTTGTAAGGTGTATTTTGGGCGTTGGCTGATCGA
GGGGGGACCCCTAGTGGTGCTCCTGGATGTAGGAGCCTCAGCTTG
GGCCCTGGAGCGCTGGAAGGGTGAGCTTTGGGACACCTGCAACAT
CGGGGTACCCTGGTACGACCGCGAGGCCAATGACGCTGTCCTGTT
CGGCTTCCTCACCACCTGGTTCCTGGGTGAGTTCCTGGCCCAGAA
CGAAGAGAAGCCGTATGTGGTTGCCCACTTCCACGAATGGTTGGC
TGGCGTTGGTCTGTGTCTGTGCCGTGCCCGGCGCTTGCCGGTGGC
AACCATCTTCACCACTCATGCCACGCTGCTGGGGCGCTACCTGTG
TGCTGGCGCTGTGGACTTCTACAACAACCTGGAGAATTTCAATGT
AGACAAGGAAGCAGGAGAGAGGCAGATCTATCACCGGTACTGCAT
GGAGCGTGCAGCAGCTCACTGTGCCCATGTCTTCACTACCGTATC
CCAGATCACCGCAATCGAGGCTCAACACCTCCTTAAGAGAAAACC
AGATATTGTGACCCCCAACGGGCTGAATGTGAAGAAGTTCTCTGC
TATGCACGAATTCCAGAACCTTCATGCTCAGAGCAAAGCACGAAT
CCAGGAATTTGTGCGTGGCCATTTTTATGGGCACCTGGACTTCAA
CCTAGACAAGACTTTGTATTTCTTTATCGCTGGCCGCTATGAGTT
TTCCAACAAGGGAGCTGATGTGTTCCTGGAGGCATTGGCCCGGCT
CAACTATCTGCTCAGAGTGAATGGCAGTGAGCAAACAGTTGTCGC
ATTCTTCATCATGCCGGCCCGGACCAATAATTTCAACGTGGAAAC
CCTGAAGGGCCAAGCCGTGCGCAAACAACTATGGGACACAGCCAA
TACAGTCAAGGAGAAATTTGGGAGGAAGCTCTACGAATCCCTTTT
AGTGGGGAGCCTCCCGGACATGAACAAGATGCTGGACAAGGAGGA
CTTCACTATGATGAAGAGAGCCATCTTTGCCACTCAGCGGCAGTC
TTTCCCACCAGTGTGCACCCACAACATGCTGGACGACTCCTCAGA
CCCCATCTTGACCACCATCCGCCGAATTGGCCTTTTCAACAGCAG
TGCCGACCGTGTGAAGGTGATTTTTCACCCAGAATTCCTTTCTTC
CACAAGCCCTCTCCTCCCCGTGGATTATGAGGAATTTGTCCGCGG
CTGTCACCTTGGGGTCTTCCCCTCCTACTATGAGCCCTGGGGCTA
CACACCAGCGGAGTGCACTGTCATGGGCATCCCCAGCATCTCCAC
CAACCTCTCCGGCTTTGGCTGCTTTATGGAGGAACACATCGCAGA
TCCCTCAGCTTACGGCATTTACATTCTGGATCGGAGGTTCCGCAG
CCTGGATGATTCATGCTCACAGCTCACCTCCTTCCTGTACAGCTT
CTGCCAGCAGAGCCGGCGACAGCGCATCATCCAGCGGAACCGCAC
AGAACGGTTGTCGGACTTGCTAGATTGGAAGTACCTGGGCCGGTA
CTACATGTCTGCGCGCCACATGGCTCTGGCCAAGGCCTTTCCAGA
CCACTTCACCTATGAACCCCATGAGGTAGATGCGACCCAGGGGTA
CCGGTACCCACGACCAGCCTCCGTCCCGCCGTCGCCCTCACTGTC
TCGACACTCCAGCCCACACCAGAGTGAGGATGAGGAAGAGCCACG
GGATGGACCCCTGGGGGAAGACAGTGAGCGTTATGATGAGGAAGA
GGAGGCTGCCAAGGACCGCCGCAACATCCGGGCACCTGAGTGGCC
ACGCAGGGCCTCCTGTTCCTCCTCCACAGGTGGCAGCAAGAGAAG
CAACTCGGTGGACACTGGGCCCTCCAGCTCACTCAGCACACCCAC
TGAGCCCCTGAGTCCTACCAGTTCCCTGGGTGAGGAGCGCAACTA
AGCTCCCACCCCCATCCCATTCCCTGCCTGTCCAGTGCTCCTCTC
GCAGAGGGCCTATGCAGATGGGAGGGTGCCTGAACCCCACTCCAG
ACTCTTGAGTGGGACCCCTACCCAGTGTGGTCCATAGCCTAACCT
CTGTTTCAGACACTCCAGCCCTTGAGCTCCAATCTTGGAGTTCCC
GCACTCCACGCCGCCGTGCCTTTCTTGGATTGCAGGATGCATTCT
TTGTGCACTGATCTGGAGTCTCCAGGCTTAGACTGGGTCCCAGAG
GCCAGGCATCTGCCATTGTTTTTCAATGCCAGAGGTTTTAGGACA
CCTGGTTTATTGGCTTCCAGGCTGTGGCTTCTTCGTTTGATCCTA
TAATCATACAGAGTATGCTTTGCTCAGGCCTGCCTCTGGGACCAC
CTCATGTTGGATTCTGTGTGGCTTCCCGAATCAGCCAAGTTCAGA
GTTAGGACATTTCAGGGATTAACATAATTGAAAATCAGCCTGCAA
GGTAGCTCAGTAGCTCTGTCGACAGATTGCTTGTCTAGCATGCCC
GAAGCCCTGGGATCTAACTCTAGAACCTCATAAACCTGGTGCGGT
GATACACATCTGTAATCCCAGCACTCGGTAGGTAGAGGTAGACGG
ATCAAGAGTTAAAGGCCATCATCCTCTGCTACATAGGGAGTTCAA
GGCCAAACTGGGCAACATGAGACACTGTCTCAAAAGCAAAGTAAA
GGTGGTGGAATGCTCACGGTCCTCCATTTCAACCCACGACTGCGA
TGCTGGGACATGCTGCAAGGTTGGCCTCCCTGGGTGTGTTCTTCA
AAGGAGCATGCGGAGTTGGACCAGACACCTTTCTGCCTTTTTTCT
GGACCAGACCTTCTTTTCCTTGGTCCAGTGTCCCCTCTAGGGAAT
GCCTCCATTGAGGGCAGAATGTCTGTCAACCCCACAAGTGCTCAG
CCCACTGTGAAACCACTGGGTTCTGGGTCCCAGTGGCTGAATCAG
GAGTCTTTTGTCACTGTGCTGCACCCCGGTCCCCTTTCCTGATAC
AAAACCGAGCCCACCGGCTTCTTGAAGCCCCACATGTACCTCGAG
GCCTTTCTGCCTGCAAGCTTCAGTGAATGGGCGGGCCCCTCCTCA
CGTGTGCTGTGTCTGGCCCAGTGCCTTTGGTTTGCATTTGGGAGG
GGGAGGGCAGAAGGTGTGTGATTGGAGTGTGTCTAGAGATGAAAA
AAAAAAAAAGAAAATACACCTGTATTTAAGAATGCC
Macaca fascicularis (Cynomolgus)
GYS1 (XM_005589837.2):
(SEQ ID NO: 241)
GCTGGCTGCGGGGTCGGCCACTGCCTCCTGACGGCTGCGAGGTTT
CACTGCAGGGGTGCCACTGGGCTCAGTGACGCTGCGGCCGCCTTC
TGCCTAGGTCCGAAGGCTTCGGGGCGGGGGTGCGGTCTTGCAATA
GGAAGCTGGGCGTCTTGCAAGCTTCCCTTCGGGCGCCAGCTACTC
GGCCCCGCACCCTACCTGGTGCATTCCCTGGACACCTCCAGGGTC
CCTACCTTGAGGTCCCCCGAGCCCCCTTCCTGCGCCAGCCATGCC
TTTAAACCGCACTTTGTCCATGTCCTCACTGCCAGGACTGGAGGA
CTGGGAGGATGAATTCGACCTGGAGAACACAGTGCTCTTCGAAGT
GGCCTGGGAGGTGGCCAACAAGGTGGGTGGCATCTACACGGTGCT
GCAGACGAAGGCGAAGGTGACGGGGGACGAATGGGGCGACAACTA
CTACCTGGTGGGGCCGTACACGGAGCAGGGCGTGAGGACCCAGGT
GGAACTGCTGGAGGCCCCCACCCCGGCCCTGAAGAAGACACTGGA
TTCCATGAACAGCAAGGGTTGCAAGGTGTATTTTGGGCGCTGGTT
GATCGAGGGAGGCCCTCTGGTGGTGCTCCTGGATGTGGGGGCCTC
AGCCTGGGCCCTGGAGCGCTGGAAGGGAGAGCTCTGGGATACCTG
CAACATCGGAGTGCCGTGGTACGACCGCGAGGCCAACGATGCTGT
CCTCTTTGGCTTTCTCACTACCTGGTTCCTGGGTGAGTTCCTCGC
GCAGAGTGAGGAGAAGCCACACGTGGTTGCTCACTTCCATGAGTG
GTTGGCAGGCATTGGACTCTGCCTGTGTCGTGCCCGGCGACTGCC
TGTAGCAACCATCTTCACCACCCATGCCACGCTGCTGGGGCGCTA
CCTGTGTGCCGGTGCTGTGGACTTCTACAACAACCTGGAGAACTT
CAACGTGGACAAGGAAGCAGGGGAGAGGCAGATCTATCACCGCTA
CTGCATGGAAAGGGCGGCAGCCCACTGTGCTCACGTCTTCACTAC
TGTGTCCCAGATCACCGCCATCGAGGCACAGCACTTGCTCAAGAG
GAAACCAGATATTGTGACCCCCAATGGGCTGAATGTGAAGAAGTT
TTCTGCCATGCATGAGTTCCAGAACCTCCATGCTCAGAGCAAGGC
TCGAATCCAGGAGTTTGTGCGGGGCCATTTTTATGGGCATCTGGA
CTTCAACTTGGACAAGACCTTGTACTTCTTTATCGCCGGCCGCTA
TGAGTTCTCCAACAAGGGTGCCGACGTCTTCCTGGAGGCCTTGGC
CCGGCTCAACTATCTGCTCAGAGTGAATGGCAGCGAGCAGACAGT
GGTTGCCTTCTTCATCATGCCGGCGCGGACCAACAATTTCAACGT
GGAAACCCTCAAAGGCCAAGCCGTGCGCAAACAGCTTTGGGACAC
GGCCAACACGGTGAAGGAGAAGTTCGGGAGGAAGCTTTATGAATC
CTTACTGGTTGGGAGCCTTCCTGACATGAACAAGATGCTGGATAA
GGAAGACTTCACTATGATGAAGAGAGCCATCTTTGCAACGCAGCG
GCAGTCTTTCCCCCCTGTGTGCACCCACAATATGCTGGATGACTC
CTCAGACCCCATCCTGACCACCATCCGCCGAATCGGCCTCTTCAA
TAGCAGTGCCGACAGGGTGAAGGTGATTTTCCACCCGGAGTTCCT
CTCCTCCACAAGCCCCCTGCTCCCGGTGGACTATGAGGAGTTTGT
CCGTGGCTGTCACCTTGGGGTCTTCCCATCCTACTATGAGCCTTG
GGGCTATACGCCGGCTGAGTGCACGGTTATGGGCATCCCCAGTAT
CTCCACCAATCTCTCCGGCTTCGGCTGCTTCATGGAGGAACACAT
CGCAGACCCCTCAGCTTACGGTATCTACATTCTCGACCGGCGGTT
CCGCAGCCTGGATGATTCCTGCTCGCAGCTCACCTCCTTCCTCTA
CAGCTTCTGTCAGCAGAGCCGGCGGCAGCGTATCATCCAGCGGAA
CCGCACGGAGCGCCTCTCCGACCTTCTGGACTGGAAATACCTAGG
CCGGTACTATATGTCTGCGCGCCACATGGCGCTGTCCAAGGCCTT
TCCAGAGCACTTCACCTACGAGCCCAGCGAGGCAGATGCGGCCCA
AGGGTACCGCTACCCACGGCCGGCCTCGGTGCCACCGTCGCCCTC
GCTGTCACGACACTCCAGCCCGCACCAGAGCGAGGACGAGGAGGA
TCCCCGGAACGGGCCTCTGGAGGAAGACAGCGAGCGCTACGATGA
GGACGAGGAGGCCGCCAAGGACCGGCGCAACATTCGTGCACCAGA
GTGGCCGCGCCGAGCGTCCTGCACCTCCTCCACCAGTGGGAGCAA
GCGCAACTCTGTGGACACGGCCACCTCCAGCTCGCTCAGCACCCC
CAGCGAGCCCCTCAGCCCCACCAGCTCCCTGGGCGAGGAGCGTAA
CTAAGTCCCCCCCACCACACTCCCTGCCTGTCCTGCCTCCCTGCT
CCAGAGAGAGGATGCAGAGGGGGGCTGCTCCTAAACCCCTGCTCC
AGATCCGCACTGGGCGTGGCCCCGCAGTGCCCCCCCTCAGTCCGC
CAAACACTCCAGCCCCTCCAGCTCCACTTTCCAAGTTCCTGCACT
CCAGAATCCACAAAGCCGTGCCTTTCTCTGATTCCAGAGTGCATA
ATCCACGCCCTGGAATCCCCTGGGCCTGGACCGCTTCCCAGAGGC
CAGGAATCTGCCGTTACTCTGCGGTGGTGCCAGAGGTTTTAGGAA
ACCTGGCATGGTGCTTTCAGGTCTGGGGCTCCTAGAGTCCCTGTG
AGGCTTGCAAATTCTACAGCACACAGAGCAGGCCACGCTCGGGCC
GGGCATGCGGGCCACCAAGTGCTGGAAACCACATGGTGTCCCTGC
GAATGGGGCAATCAAGTCCAGAGCCGGGGCACTTTTCAGAGTTTG
AAGGTAACTGAGAGCAGATGGTCCTCCATTTCAACTCCAGAACTG
GGGCTCTGGGATGGGCTCATATTCTAGCCCTCCCCAGCATGTCAG
AGCCAGGCTCTGCCTGGAGGATCCCTCCATCCGGCTCCTGTCATC
CCCTACGCTTTGGCCAAGCCAGAGGTGGCAGAACCACTTGGCCGC
TCATTCCTTCTGGAGGACACACAGTCTCGGTGCAGATGCCTTCCT
GCCTTTCTGGCCTTTTCTGGACCAGATCCTACTCCTCCTTTCTTT
ATCTGAGATCTCCCTCCAGGGAATCTGCCTGCAGAGGACAGAGCT
GGCTGTCTACCCCCACCCCTAACCTGGCTTATTCCCAACCGCTCA
GCCCACTGCGAAACCACTAGGTTCTAGGTCCTGGCTTCTAGATCT
GGAACCTTACCACGTTGCTGCATACTAGTCCCTTTCCCATGATCC
GGAACTGAGGTCACTGGGTTCTAGAACCCCCACATTTACCTCGAG
GCTCTTCCATCCCCAAACTGTGCCCTGCCTTCAGCTTTGGTGAAA
AGGAGGGACCCTCATGTGTGCTGTGCTGTGTCTGCACCGCTTGGT
TTGCAGTTGGGAGGGGAGGGCAGGAGGGGTGTGATTGGAGTGTGT
CCGGAGATGAGATGAAAAAAATACACCTATATTTAAGAATCCCA

[0196] In some embodiments, an oligonucleotide may have a region of complementarity to GYS1 gene sequences of multiple species, e.g., selected from human, mouse and non-human species. In some embodiments, the GYS1-targeting oligonucleotide comprises a nucleotide sequence comprising a region complementary to a target region that comprises at least 10 continuous nucleotides (e.g., at least 10, at least 12, at least 14, at least 16, at least 18, at least 20 or more continuous nucleotides) in SEQ ID NO: 160, SEQ ID NO: 161, or SEQ ID NO: 241. In some embodiments, the GYS1-targeting oligonucleotide comprises a nucleotide sequence comprising a region complementary to a target region that comprises at least 10 continuous nucleotides (e.g., at least 10, at least 12, at least 14, at least 16, at least 18 or more continuous nucleotides) in SEQ ID NOs: 162-186.

a. Oligonucleotide Size/Sequence

[0197] Oligonucleotides may be of a variety of different lengths, e.g., depending on the format. In some embodiments, an oligonucleotide is 7, 8, 9, 10, 11, 12, 13, 14, 15, 16, 17, 18, 19, 20, 21, 22, 23, 24, 25, 26, 27, 28, 29, 30, 35, 40, 45, 50, 75, or more nucleotides in length. In some embodiments, the oligonucleotide is 8 to 50 nucleotides in length, 8 to 40 nucleotides in length, 8 to 30 nucleotides in length, 10 to 15 nucleotides in length, 10 to 20 nucleotides in length, 15 to 25 nucleotides in length, 21 to 23 nucleotides in lengths, 20 to 25 nucleotides in length, etc.

[0198] In some embodiments, a nucleic acid sequence of an oligonucleotide for purposes of the present disclosure is “complementary” to a target nucleic acid when it is specifically hybridizable to the target nucleic acid. In some embodiments, an oligonucleotide hybridizing to a target nucleic acid (e.g., an mRNA or pre-mRNA molecule) results in modulation of activity or expression of the target (e.g., decreased mRNA translation, altered pre-mRNA splicing, exon skipping, target mRNA degradation, etc.). In some embodiments, a nucleic acid sequence of an oligonucleotide has a sufficient degree of complementarity to its target nucleic acid such that it does not hybridize non-target sequences under conditions in which avoidance of non-specific binding is desired, e.g., under physiological conditions. Thus, in some embodiments, an oligonucleotide may be at least 80%, at least 85%, at least 90%, at least 91%, at least 92%, at least 93%, at least 94%, at least 95%, at least 96%, at least 97%, at least 98%, at least 99% or 100% complementary to the consecutive nucleotides of a target nucleic acid. In some embodiments a complementary nucleotide sequence need not be 100% complementary to that of its target to be specifically hybridizable or specific for a target nucleic acid. In certain embodiments, oligonucleotides comprise one or more mismatched nucleobases relative to the target nucleic acid. In certain embodiments, activity relating to the target is reduced by such mismatch, but activity relating to a non-target is reduced by a greater amount (i.e., selectivity for the target nucleic acid is increased and off-target effects are decreased).

[0199] In some embodiments, an oligonucleotide comprises region of complementarity to a target nucleic acid that is in the range of 5-50 nucleotides in length. In some embodiments, an oligonucleotide comprises region of complementarity to a target nucleic acid that is in the range of 8-50 (e.g., 8-15, 8-20, 8-25, 8-30, 8-35, 8-40, 8-45, 8-50, 10-15, 10-20, 10-25, 10-30, 10-35, 10-40, 10-45, 10-50, 15-20, 15-25, 15-30, 15-35, 15-40, 15-45, 15-50, 20-25, 20-30, 20-35, 20-40, 20-45, 20-50, 25-30, 25-35, 25-40, 25-45, 25-50, 30-35, 30-40, 30-45, 30-50, 35-40, 35-45, 35-50, 40-45, 40-50, or 45-50) nucleotides in length. In some embodiments, the region of complementarity is complementary with at least 8 consecutive nucleotides of a target nucleic acid. In some embodiments, an oligonucleotide may contain 1, 2 or 3 base mismatches compared to the portion of the consecutive nucleotides of target nucleic acid. In some embodiments the oligonucleotide may have up to 3 mismatches over 15 bases, or up to 2 mismatches over 10 bases.

[0200] In some embodiments, an oligonucleotide comprises at least 10, 11, 12, 13, 14, 15, 16, 17, 18, 19, or 20 consecutive nucleotides of a sequence comprising any one of SEQ ID NOs: 7494-11107 and 212-236. In some embodiments, an oligonucleotide comprises a sequence comprising any one of SEQ ID NOs: 7494-11107 and 212-236. In some embodiments, an oligonucleotide comprises a sequence that shares at least 70%, 75%, 80%, 85%, 90%, 95%, or 97% sequence identity with at least 12 or at least 15 consecutive nucleotides of any one of SEQ ID NOs: 7494-11107 and 212-236.

[0201] In some embodiments, an oligonucleotide comprises a region of complementarity to a target sequence as set forth in any one of SEQ ID NO: 266-7493 and 162-186. In some embodiments, an oligonucleotide comprises region of complementarity that is at least 70%, 75%, 80%, 85%, 90%, 95%, 97%; 99%, or 100% complementary with at least 12 or at least 15 consecutive nucleotides of a target sequence as set forth of any one of SEQ ID NO: 266-7493 and 162-186. In some embodiments, the region of complementarity is at least 8, at least 9, at least 10, at least 11, at least 12, at least 13, at least 14, at least 15, at least 16, at least 17, at least 19 or at least 20 nucleotides in length. In some embodiments, the region of complementarity is 8, 9, 10, 11, 12, 13, 14, 15, 16, 17, 18, 19, or 20 nucleotides in length. In some embodiments, the region of complementarity is in the range of 8 to 20, 10 to 20 or 15 to 20 nucleotides in length. In some embodiments, the region of complementarity is fully complementary with all or a portion of its target sequence. In some embodiments, the region of complementarity includes 1, 2, 3 or more mismatches.

[0202] In some embodiments, the oligonucleotide is complementary (e.g., at least 85% at least 90%, at least 95%, or 100%) to a target sequence of any one of the oligonucleotides provided herein (e.g., the oligonucleotides as set forth in any one of SEQ ID NOs: 7494-11107 or listed in Table 8). In some embodiments, such target sequence is 100% complementary to an oligonucleotide set forth in any one of SEQ ID NOs: 7494-11107 or Table 8.

[0203] In some embodiments, it should be appreciated that methylation of the nucleobase uracil at the C5 position forms thymine. Thus, in some embodiments, a nucleotide or nucleoside having a C5 methylated uracil (or 5-methyl-uracil) may be equivalently identified as a thymine nucleotide or nucleoside.

[0204] In some embodiments, any one or more of the thymine bases (T's) in any one of the oligonucleotides provided herein (e.g., the oligonucleotides set forth in SEQ ID NOs: SEQ ID NOs: 7494-11107, and Table 8) may optionally be uracil bases (U's), and/or any one or more of the U's may optionally be T's.

b. Oligonucleotide Modifications

[0205] The oligonucleotides described herein may be modified, e.g., comprise a modified sugar moiety, a modified internucleoside linkage, a modified nucleotide or nucleoside and/or (e.g., and) combinations thereof. In addition, in some embodiments, oligonucleotides may exhibit one or more of the following properties: do not mediate alternative splicing; are not immune stimulatory; are nuclease resistant; have improved cell uptake compared to unmodified oligonucleotides; are not toxic to cells or mammals; have improved endosomal exit internally in a cell; minimizes TLR stimulation; or avoid pattern recognition receptors. Any of the modified chemistries or formats of oligonucleotides described herein can be combined with each other. For example, one, two, three, four, five, or more different types of modifications can be included within the same oligonucleotide.

[0206] In some embodiments, certain nucleotide or nucleoside modifications may be used that make an oligonucleotide into which they are incorporated more resistant to nuclease digestion than the native oligodeoxynucleotide or oligoribonucleotide molecules; these modified oligonucleotides survive intact for a longer time than unmodified oligonucleotides. Specific examples of modified oligonucleotides include those comprising modified backbones, for example, modified internucleoside linkages such as phosphorothioates, phosphotriesters, methyl phosphonates, short chain alkyl or cycloalkyl intersugar linkages or short chain heteroatomic or heterocyclic intersugar linkages. Accordingly, oligonucleotides of the disclosure can be stabilized against nucleolytic degradation such as by the incorporation of a modification, e.g., a nucleotide or nucleoside modification.

[0207] In some embodiments, an oligonucleotide may be of up to 50 or up to 100 nucleotides in length in which 2 to 10, 2 to 15, 2 to 16, 2 to 17, 2 to 18, 2 to 19, 2 to 20, 2 to 25, 2 to 30, 2 to 40, 2 to 45, or more nucleotides or nucleoside of the oligonucleotide are modified nucleotides/nucleosides. The oligonucleotide may be of 8 to 30 nucleotides in length in which 2 to 10, 2 to 15, 2 to 16, 2 to 17, 2 to 18, 2 to 19, 2 to 20, 2 to 25, 2 to 30 nucleotides or nucleoside of the oligonucleotide are modified nucleotides/nucleosides. The oligonucleotide may be of 8 to 15 nucleotides in length in which 2 to 4, 2 to 5, 2 to 6, 2 to 7, 2 to 8, 2 to 9, 2 to 10, 2 to 11, 2 to 12, 2 to 13, 2 to 14 nucleotides or nucleoside of the oligonucleotide are modified nucleotides/nucleosides. Optionally, the oligonucleotides may have every nucleotide or nucleoside except 1, 2, 3, 4, 5, 6, 7, 8, 9, or 10 nucleotides/nucleosides modified. Oligonucleotide modifications are described further herein.

c. Modified Nucleosides

[0208] In some embodiments, the oligonucleotide described herein comprises at least one nucleoside modified at the 2′ position of the sugar. In some embodiments, an oligonucleotide comprises at least one 2′-modified nucleoside. In some embodiments, all of the nucleosides in the oligonucleotide are 2′-modified nucleosides.

[0209] In some embodiments, the oligonucleotide described herein comprises one or more non-bicyclic 2′-modified nucleosides, e.g., 2′-deoxy, 2′-fluoro (2′-F), 2′-O-methyl (2′-O-Me), 2′-O-methoxyethyl (2′-MOE), 2′-O-aminopropyl (2′-O-AP), 2′-O-dimethylaminoethyl (2′-O-DMAOE), 2′-O-dimethylaminopropyl (2′-O-DMAP), 2′-O-dimethylaminoethyloxyethyl (2′-O-DMAEOE), or 2′-O—N-methylacetamido (2′-O-NMA) modified nucleoside.

[0210] In some embodiments, the oligonucleotide described herein comprises one or more 2′-4′ bicyclic nucleosides in which the ribose ring comprises a bridge moiety connecting two atoms in the ring, e.g., connecting the 2′-O atom to the 4′-C atom via a methylene (LNA) bridge, an ethylene (ENA) bridge, or a (S)-constrained ethyl (cEt) bridge. Examples of LNAs are described in International Patent Application Publication WO/2008/043753, published on Apr. 17, 2008, and entitled “RNA Antagonist Compounds For The Modulation Of PCSK9”, the contents of which are incorporated herein by reference in its entirety. Examples of ENAs are provided in International Patent Publication No. WO 2005/042777, published on May 12, 2005, and entitled “APP/ENA Antisense”; Morita et al., Nucleic Acid Res., Suppl 1:241-242, 2001; Surono et al., Hum. Gene Ther., 15:749-757, 2004; Koizumi, Curr. Opin. Mol. Ther., 8:144-149, 2006 and Horie et al., Nucleic Acids Symp. Ser (Oxf), 49:171-172, 2005; the disclosures of which are incorporated herein by reference in their entireties. Examples of cEt are provided in U.S. Pat. Nos. 7,101,993; 7,399,845 and 7,569,686, each of which is herein incorporated by reference in its entirety.

[0211] In some embodiments, the oligonucleotide comprises a modified nucleoside disclosed in one of the following United States patent or patent Application Publications: U.S. Pat. No. 7,399,845, issued on Jul. 15, 2008, and entitled “6-Modified Bicyclic Nucleic Acid Analogs”; U.S. Pat. No. 7,741,457, issued on Jun. 22, 2010, and entitled “6-Modified Bicyclic Nucleic Acid Analogs”; U.S. Pat. No. 8,022,193, issued on Sep. 20, 2011, and entitled “6-Modified Bicyclic Nucleic Acid Analogs”; U.S. Pat. No. 7,569,686, issued on Aug. 4, 2009, and entitled “Compounds And Methods For Synthesis Of Bicyclic Nucleic Acid Analogs”; U.S. Pat. No. 7,335,765, issued on Feb. 26, 2008, and entitled “Novel Nucleoside And Oligonucleotide Analogues”; U.S. Pat. No. 7,314,923, issued on Jan. 1, 2008, and entitled “Novel Nucleoside And Oligonucleotide Analogues”; U.S. Pat. No. 7,816,333, issued on Oct. 19, 2010, and entitled “Oligonucleotide Analogues And Methods Utilizing The Same” and US Publication Number 2011/0009471 now U.S. Pat. No. 8,957,201, issued on Feb. 17, 2015, and entitled “Oligonucleotide Analogues And Methods Utilizing The Same”, the entire contents of each of which are incorporated herein by reference for all purposes.

[0212] In some embodiments, the oligonucleotide comprises at least one modified nucleoside that results in an increase in Tm of the oligonucleotide in a range of 1° C., 2° C., 3° C., 4° C., or 5° C. compared with an oligonucleotide that does not have the at least one modified nucleoside. The oligonucleotide may have a plurality of modified nucleosides that result in a total increase in Tm of the oligonucleotide in a range of 2° C., 3° C., 4° C., 5° C., 6° C., 7° C., 8° C., 9° C. 10° C., 15° C., 20° C., 25° C., 30° C., 35° C., 40° C., 45° C. or more compared with an oligonucleotide that does not have the modified nucleoside.

[0213] The oligonucleotide may comprise a mix of nucleosides of different kinds. For example, an oligonucleotide may comprise a mix of 2′-deoxyribonucleosides or ribonucleosides and 2′-fluoro modified nucleosides. An oligonucleotide may comprise a mix of deoxyribonucleosides or ribonucleosides and 2′-O-Me modified nucleosides. An oligonucleotide may comprise a mix of 2′-fluoro modified nucleosides and 2′-O-methyl modified nucleosides. An oligonucleotide may comprise a mix of bridged nucleosides and 2′-fluoro or 2′-O-methyl modified nucleotides. An oligonucleotide may comprise a mix of non-bicyclic 2′-modified nucleosides (e.g., 2′-O-MOE) and 2′-4′ bicyclic nucleosides (e.g., LNA, ENA, cEt). An oligonucleotide may comprise a mix of 2′-fluoro modified nucleosides and 2′-O-Me modified nucleosides. An oligonucleotide may comprise a mix of 2′-4′ bicyclic nucleosides and 2′-MOE, 2′-fluoro, or 2′-O-Me modified nucleosides. An oligonucleotide may comprise a mix of non-bicyclic 2′-modified nucleosides (e.g., 2′-MOE, 2′-fluoro, or 2′-O-Me) and 2′-4′ bicyclic nucleosides (e.g., LNA, ENA, cEt).

[0214] The oligonucleotide may comprise alternating nucleosides of different kinds. For example, an oligonucleotide may comprise alternating 2′-deoxyribonucleosides or ribonucleosides and 2′-fluoro modified nucleosides. An oligonucleotide may comprise alternating deoxyribonucleosides or ribonucleosides and 2′-O-Me modified nucleosides. An oligonucleotide may comprise alternating 2′-fluoro modified nucleosides and 2′-O-Me modified nucleosides. An oligonucleotide may comprise alternating bridged nucleosides and 2′-fluoro or 2′-O-methyl modified nucleotides. An oligonucleotide may comprise alternating non-bicyclic 2′-modified nucleosides (e.g., 2′-O-MOE) and 2′-4′ bicyclic nucleosides (e.g., LNA, ENA, cEt). An oligonucleotide may comprise alternating 2′-4′ bicyclic nucleosides and 2′-MOE, 2′-fluoro, or 2′-O-Me modified nucleosides. An oligonucleotide may comprise alternating non-bicyclic 2′-modified nucleosides (e.g., 2′-MOE, 2′-fluoro, or 2′-O-Me) and 2′-4′ bicyclic nucleosides (e.g., LNA, ENA, cEt).

[0215] In some embodiments, an oligonucleotide described herein comprises a 5′-vinylphosphonate modification, one or more abasic residues, and/or one or more inverted abasic residues.

d. Internucleoside Linkages/Backbones

[0216] In some embodiments, oligonucleotide may contain a phosphorothioate or other modified internucleoside linkage. In some embodiments, the oligonucleotide comprises phosphorothioate internucleoside linkages. In some embodiments, the oligonucleotide comprises phosphorothioate internucleoside linkages between at least two nucleosides. In some embodiments, the oligonucleotide comprises phosphorothioate internucleoside linkages between all nucleosides. For example, in some embodiments, oligonucleotides comprise modified internucleoside linkages at the first, second, and/or (e.g., and) third internucleoside linkage at the 5′ or 3′ end of the nucleotide sequence.

[0217] Phosphorus-containing linkages that may be used include, but are not limited to, phosphorothioates, chiral phosphorothioates, phosphorodithioates, phosphotriesters, aminoalkylphosphotriesters, methyl and other alkyl phosphonates comprising 3′alkylene phosphonates and chiral phosphonates, phosphinates, phosphoramidates comprising 3′-amino phosphoramidate and aminoalkylphosphoramidates, thionophosphoramidates, thionoalkylphosphonates, thionoalkylphosphotriesters, and boranophosphates having normal 3′-5′ linkages, 2′-5′ linked analogs of these, and those having inverted polarity wherein the adjacent pairs of nucleoside units are linked 3′-5′ to 5′-3′ or 2′-5′ to 5′-2′; see U.S. Pat. Nos. 3,687,808; 4,469,863; 4,476,301; 5,023,243; 5,177,196; 5,188,897; 5,264,423; 5,276,019; 5,278,302; 5,286,717; 5,321,131; 5,399,676; 5,405,939; 5,453,496; 5,455, 233; 5,466,677; 5,476,925; 5,519,126; 5,536,821; 5,541,306; 5,550,111; 5,563, 253; 5,571,799; 5,587,361; and 5,625,050.

[0218] In some embodiments, oligonucleotides may have heteroatom backbones, such as methylene(methylimino) or MMI backbones; amide backbones (see De Mesmacker et al. Acc. Chem. Res. 1995, 28:366-374); morpholino backbones (see Summerton and Weller, U.S. Pat. No. 5,034,506); or peptide nucleic acid (PNA) backbones (wherein the phosphodiester backbone of the oligonucleotide is replaced with a polyamide backbone, the nucleotides being bound directly or indirectly to the aza nitrogen atoms of the polyamide backbone, see Nielsen et al., Science 1991, 254, 1497).

e. Stereospecific Oligonucleotides

[0219] In some embodiments, internucleotidic phosphorus atoms of oligonucleotides are chiral, and the properties of the oligonucleotides are adjusted based on the configuration of the chiral phosphorus atoms. In some embodiments, appropriate methods may be used to synthesize P-chiral oligonucleotide analogs in a stereocontrolled manner (e.g., as described in Oka N, Wada T, Stereocontrolled synthesis of oligonucleotide analogs containing chiral internucleotidic phosphorus atoms. Chem Soc Rev. 2011 December; 40(12):5829-43.) In some embodiments, phosphorothioate containing oligonucleotides are provided that comprise nucleoside units that are joined together by either substantially all Sp or substantially all Rp phosphorothioate intersugar linkages. In some embodiments, such phosphorothioate oligonucleotides having substantially chirally pure intersugar linkages are prepared by enzymatic or chemical synthesis, as described, for example, in U.S. Pat. No. 5,587,261, issued on Dec. 12, 1996, the contents of which are incorporated herein by reference in their entirety. In some embodiments, chirally controlled oligonucleotides provide selective cleavage patterns of a target nucleic acid. For example, in some embodiments, a chirally controlled oligonucleotide provides single site cleavage within a complementary sequence of a nucleic acid, as described, for example, in US Patent Application Publication 20170037399 A1, published on Feb. 2, 2017, entitled “CHIRAL DESIGN”, the contents of which are incorporated herein by reference in their entirety.

f. Morpholinos

[0220] In some embodiments, the oligonucleotide may be a morpholino-based compounds. Morpholino-based oligomeric compounds are described in Dwaine A. Braasch and David R. Corey, Biochemistry, 2002, 41(14), 4503-4510); Genesis, volume 30, issue 3, 2001; Heasman, J., Dev. Biol., 2002, 243, 209-214; Nasevicius et al., Nat. Genet., 2000, 26, 216-220; Lacerra et al., Proc. Natl. Acad. Sci., 2000, 97, 9591-9596; and U.S. Pat. No. 5,034,506, issued Jul. 23, 1991. In some embodiments, the morpholino-based oligomeric compound is a phosphorodiamidate morpholino oligomer (PMO) (e.g., as described in Iverson, Curr. Opin. Mol. Ther., 3:235-238, 2001; and Wang et al., J. Gene Med., 12:354-364, 2010; the disclosures of which are incorporated herein by reference in their entireties).

g. Gapmers

[0221] In some embodiments, the oligonucleotide described herein is a gapmer. A gapmer oligonucleotide generally has the formula 5′-X-Y-Z-3′, with X and Z as flanking regions around a gap region Y. In some embodiments, flanking region X of formula 5′-X-Y-Z-3′ is also referred to as X region, flanking sequence X, 5′ wing region X, or 5′ wing segment. In some embodiments, flanking region Z of formula 5′-X-Y-Z-3′ is also referred to as Z region, flanking sequence Z, 3′ wing region Z, or 3′ wing segment. In some embodiments, gap region Y of formula 5′-X-Y-Z-3′ is also referred to as Y region, Y segment, or gap-segment Y. In some embodiments, each nucleoside in the gap region Y is a 2′-deoxyribonucleoside, and neither the 5′ wing region X or the 3′ wing region Z contains any 2′-deoxyribonucleosides.

[0222] In some embodiments, the Y region is a contiguous stretch of nucleotides, e.g., a region of 6 or more DNA nucleotides, which are capable of recruiting an RNase, such as RNase H. In some embodiments, the gapmer binds to the target nucleic acid, at which point an RNase is recruited and can then cleave the target nucleic acid. In some embodiments, the Y region is flanked both 5′ and 3′ by regions X and Z comprising high-affinity modified nucleosides, e.g., one to six high-affinity modified nucleosides. Examples of high affinity modified nucleosides include, but are not limited to, 2′-modified nucleosides (e.g., 2′-MOE, 2′O-Me, 2′-F) or 2′-4′ bicyclic nucleosides (e.g., LNA, cEt, ENA). In some embodiments, the flanking sequences X and Z may be of 1-20 nucleotides, 1-8 nucleotides, or 1-5 nucleotides in length. The flanking sequences X and Z may be of similar length or of dissimilar lengths. In some embodiments, the gap-segment Y may be a nucleotide sequence of 5-20 nucleotides, 5-15 twelve nucleotides, or 6-10 nucleotides in length.

[0223] In some embodiments, the gap region of the gapmer oligonucleotides may contain modified nucleotides known to be acceptable for efficient RNase H action in addition to DNA nucleotides, such as C4′-substituted nucleotides, acyclic nucleotides, and arabino-configured nucleotides. In some embodiments, the gap region comprises one or more unmodified internucleosides. In some embodiments, one or both flanking regions each independently comprise one or more phosphorothioate internucleoside linkages (e.g., phosphorothioate internucleoside linkages or other linkages) between at least two, at least three, at least four, at least five or more nucleotides. In some embodiments, the gap region and two flanking regions each independently comprise modified internucleoside linkages (e.g., phosphorothioate internucleoside linkages or other linkages) between at least two, at least three, at least four, at least five or more nucleotides.

[0224] A gapmer may be produced using appropriate methods. Representative U.S. patents, U.S. patent publications, and PCT publications that teach the preparation of gapmers include, but are not limited to, U.S. Pat. Nos. 5,013,830; 5,149,797; 5,220,007; 5,256,775; 5,366,878; 5,403,711; 5,491,133; 5,565,350; 5,623,065; 5,652,355; 5,652,356; 5,700,922; 5,898,031; 7,015,315; 7,101,993; 7,399,845; 7,432,250; 7,569,686; 7,683,036; 7,750,131; 8,580,756; 9,045,754; 9,428,534; 9,695,418; 10,017,764; 10,260,069; 9,428,534; 8,580,756; U.S. patent publication Nos. US20050074801, US20090221685; US20090286969, US20100197762, and US20110112170; PCT publication Nos. WO2004069991; WO2005023825; WO2008049085 and WO2009090182; and EP Patent No. EP2, 149,605, each of which is herein incorporated by reference in its entirety.

[0225] In some embodiments, the gapmer is 10-40 nucleosides in length. For example, the gapmer may be 10-40, 10-35, 10-30, 10-25, 10-20, 10-15, 15-40, 15-35, 15-30, 15-25, 15-20, 20-40, 20-35, 20-30, 20-25, 25-40, 25-35, 25-30, 30-40, 30-35, or 35-40 nucleosides in length. In some embodiments, the gapmer is 10, 11, 12, 13, 14, 15, 16, 17, 18, 19, 20, 21, 22, 23, 24, 25, 26, 27, 28, 29, 30, 31, 32, 33, 34, 35, 36, 37, 38, 39, or 40 nucleosides in length.

[0226] In some embodiments, the gap region Y in the gapmer is 5-20 nucleosides in length. For example, the gap region Y may be 5-20, 5-15, 5-10, 10-20, 10-15, or 15-20 nucleosides in length. In some embodiments, the gap region Y is 5, 6, 7, 8, 9, 10, 11, 12, 13, 14, 15, 16, 17, 18, 19, or 20 nucleosides in length. In some embodiments, each nucleoside in the gap region Y is a 2′-deoxyribonucleoside. In some embodiments, all nucleosides in the gap region Y are 2′-deoxyribonucleosides. In some embodiments, one or more of the nucleosides in the gap region Y is a modified nucleoside (e.g., a 2′ modified nucleoside such as those described herein). In some embodiments, one or more cytosines in the gap region Y are optionally 5-methyl-cytosines. In some embodiments, each cytosine in the gap region Y is a 5-methyl-cytosines.

[0227] In some embodiments, the 5′wing region of the gapmer (X in the 5′-X-Y-Z-3′ formula) and the 3′wing region of the gapmer (Z in the 5′-X-Y-Z-3′ formula) are independently 1-20 nucleosides long. For example, the 5′wing region of the gapmer (X in the 5′-X-Y-Z-3′ formula) and the 3′wing region of the gapmer (Z in the 5′-X-Y-Z-3′ formula) may be independently 1-20, 1-15, 1-10, 1-7, 1-5, 1-3, 1-2, 2-5, 2-7, 3-5, 3-7, 5-20, 5-15, 5-10, 10-20, 10-15, or 15-20 nucleosides long. In some embodiments, the 5′wing region of the gapmer (X in the 5′-X-Y-Z-3′ formula) and the 3′wing region of the gapmer (Z in the 5′-X-Y-Z-3′ formula) are independently 1, 2, 3, 4, 5, 6, 7, 8, 9, 10, 11, 12, 13, 14, 15, 16, 17, 18, 19, or 20 nucleosides long. In some embodiments, the 5′wing region of the gapmer (X in the 5′-X-Y-Z-3′ formula) and the 3′wing region of the gapmer (Z in the 5′-X-Y-Z-3′ formula) are of the same length. In some embodiments, the 5′wing region of the gapmer (X in the 5′-X-Y-Z-3′ formula) and the 3′wing region of the gapmer (Z in the 5′-X-Y-Z-3′ formula) are of different lengths. In some embodiments, the 5′wing region of the gapmer (X in the 5′-X-Y-Z-3′ formula) is longer than the 3′wing region of the gapmer (Z in the 5′-X-Y-Z-3′ formula). In some embodiments, the 5′wing region of the gapmer (X in the 5′-X-Y-Z-3′ formula) is shorter than the 3′wing region of the gapmer (Z in the 5′-X-Y-Z-3′ formula).

[0228] In some embodiments, the gapmer comprises a 5′-X-Y-Z-3′ of 5-10-5, 4-12-4, 3-14-3, 2-16-2, 1-18-1, 3-10-3, 2-10-2, 1-10-1, 2-8-2, 4-6-4, 3-6-3, 2-6-2, 4-7-4, 3-7-3, 2-7-2, 4-8-4, 3-8-3, 2-8-2, 1-8-1, 2-9-2, 1-9-1, 2-10-2, 1-10-1, 1-12-1, 1-16-1, 2-15-1, 1-15-2, 1-14-3, 3-14-1,2-14-2, 1-13-4, 4-13-1, 2-13-3, 3-13-2, 1-12-5, 5-12-1, 2-12-4, 4-12-2, 3-12-3, 1-11-6, 6-11-1, 2-11-5, 5-11-2, 3-11-4, 4-11-3, 1-17-1, 2-16-1, 1-16-2, 1-15-3, 3-15-1, 2-15-2, 1-14-4, 4-14-1, 2-14-3, 3-14-2, 1-13-5, 5-13-1, 2-13-4, 4-13-2, 3-13-3, 1-12-6, 6-12-1, 2-12-5, 5-12-2, 3-12-4, 4-12-3, 1-11-7, 7-11-1, 2-11-6, 6-11-2, 3-11-5, 5-11-3, 4-11-4, 1-18-1, 1-17-2, 2-17-1, 1-16-3, 1-16-3, 2-16-2, 1-15-4, 4-15-1, 2-15-3, 3-15-2, 1-14-5, 5-14-1, 2-14-4, 4-14-2, 3-14-3, 1-13-6, 6-13-1, 2-13-5, 5-13-2, 3-13-4, 4-13-3, 1-12-7, 7-12-1, 2-12-6, 6-12-2, 3-12-5, 5-12-3, 1-11-8, 8-11-1, 2-11-7, 7-11-2, 3-11-6, 6-11-3, 4-11-5, 5-11-4, 1-18-1, 1-17-2, 2-17-1, 1-16-3, 3-16-1, 2-16-2, 1-15-4, 4-15-1, 2-15-3, 3-15-2, 1-14-5, 2-14-4, 4-14-2, 3-14-3, 1-13-6, 6-13-1, 2-13-5, 5-13-2, 3-13-4, 4-13-3, 1-12-7, 7-12-1, 2-12-6, 6-12-2, 3-12-5, 5-12-3, 1-11-8, 8-11-1, 2-11-7, 7-11-2, 3-11-6, 6-11-3, 4-11-5, 5-11-4, 1-19-1, 1-18-2, 2-18-1, 1-17-3, 3-17-1, 2-17-2, 1-16-4, 4-16-1, 2-16-3, 3-16-2, 1-15-5, 2-15-4, 4-15-2, 3-15-3, 1-14-6, 6-14-1, 2-14-5, 5-14-2, 3-14-4, 4-14-3, 1-13-7, 7-13-1, 2-13-6, 6-13-2, 3-13-5, 5-13-3, 4-13-4, 1-12-8, 8-12-1, 2-12-7, 7-12-2, 3-12-6, 6-12-3, 4-12-5, 5-12-4, 2-11-8, 8-11-2, 3-11-7, 7-11-3, 4-11-6, 6-11-4, 5-11-5, 1-20-1, 1-19-2, 2-19-1, 1-18-3, 3-18-1, 2-18-2, 1-17-4, 4-17-1, 2-17-3, 3-17-2, 1-16-5, 2-16-4, 4-16-2, 3-16-3, 1-15-6, 6-15-1, 2-15-5, 5-15-2, 3-15-4, 4-15-3, 1-14-7, 7-14-1, 2-14-6, 6-14-2, 3-14-5, 5-14-3, 4-14-4, 1-13-8, 8-13-1, 2-13-7, 7-13-2, 3-13-6, 6-13-3, 4-13-5, 5-13-4, 2-12-8, 8-12-2, 3-12-7, 7-12-3, 4-12-6, 6-12-4, 5-12-5, 3-11-8, 8-11-3, 4-11-7, 7-11-4, 5-11-6, 6-11-5, 1-21-1, 1-20-2, 2-20-1, 1-20-3, 3-19-1, 2-19-2, 1-18-4, 4-18-1, 2-18-3, 3-18-2, 1-17-5, 2-17-4, 4-17-2, 3-17-3, 1-16-6, 6-16-1, 2-16-5, 5-16-2, 3-16-4, 4-16-3, 1-15-7, 7-15-1, 2-15-6, 6-15-2, 3-15-5, 5-15-3, 4-15-4, 1-14-8, 8-14-1, 2-14-7, 7-14-2, 3-14-6, 6-14-3, 4-14-5, 5-14-4, 2-13-8, 8-13-2, 3-13-7, 7-13-3, 4-13-6, 6-13-4, 5-13-5, Jan. 12, 2010, 10-12-1, 2-12-9, 9-12-2, 3-12-8, 8-12-3, 4-12-7, 7-12-4, 5-12-6, 6-12-5, 4-11-8, 8-11-4, 5-11-7, 7-11-5, 6-11-6, 1-22-1, 1-21-2, 2-21-1, 1-21-3, 3-20-1, 2-20-2, 1-19-4, 4-19-1, 2-19-3, 3-19-2, 1-18-5, 2-18-4, 4-18-2, 3-18-3, 1-17-6, 6-17-1, 2-17-5, 5-17-2, 3-17-4, 4-17-3, 1-16-7, 7-16-1, 2-16-6, 6-16-2, 3-16-5, 5-16-3, 4-16-4, 1-15-8, 8-15-1, 2-15-7, 7-15-2, 3-15-6, 6-15-3, 4-15-5, 5-15-4, 2-14-8, 8-14-2, 3-14-7, 7-14-3, 4-14-6, 6-14-4, 5-14-5, 3-13-8, 8-13-3, 4-13-7, 7-13-4, 5-13-6, 6-13-5, 4-12-8, 8-12-4, 5-12-7, 7-12-5, 6-12-6, 5-11-8, 8-11-5, 6-11-7, or 7-11-6. The numbers indicate the number of nucleosides in X, Y, and Z regions in the 5′-X-Y-Z-3′ gapmer.

[0229] In some embodiments, one or more nucleosides in the 5′wing region of the gapmer (X in the 5′-X-Y-Z-3′ formula) or the 3′wing region of the gapmer (Z in the 5′-X-Y-Z-3′ formula) are modified nucleotides (e.g., high-affinity modified nucleosides). In some embodiments, the modified nucleoside (e.g., high-affinity modified nucleosides) is a 2′-modified nucleoside. In some embodiments, the 2′-modified nucleoside is a 2′-4′ bicyclic nucleoside or a non-bicyclic 2′-modified nucleoside. In some embodiments, the high-affinity modified nucleoside is a 2′-4′ bicyclic nucleoside (e.g., LNA, cEt, or ENA) or a non-bicyclic 2′-modified nucleoside (e.g., 2′-fluoro (2′-F), 2′-O-methyl (2′-O-Me), 2′-O-methoxyethyl (2′-MOE), 2′-O-aminopropyl (2′-O-AP), 2′-O-dimethylaminoethyl (2′-O-DMAOE), 2′-O-dimethylaminopropyl (2′-O-DMAP), 2′-O-dimethylaminoethyloxyethyl (2′-O-DMAEOE), or 2′-O—N-methylacetamido (2′-O-NMA)).

[0230] In some embodiments, one or more nucleosides in the 5′wing region of the gapmer (X in the 5′-X-Y-Z-3′ formula) are high-affinity modified nucleosides. In some embodiments, each nucleoside in the 5′wing region of the gapmer (X in the 5′-X-Y-Z-3′ formula) is a high-affinity modified nucleoside. In some embodiments, one or more nucleosides in the 3′wing region of the gapmer (Z in the 5′-X-Y-Z-3′ formula) are high-affinity modified nucleosides. In some embodiments, each nucleoside in the 3′wing region of the gapmer (Z in the 5′-X-Y-Z-3′ formula) is a high-affinity modified nucleoside. In some embodiments, one or more nucleosides in the 5′wing region of the gapmer (X in the 5′-X-Y-Z-3′ formula) are high-affinity modified nucleosides and one or more nucleosides in the 3′wing region of the gapmer (Z in the 5′-X-Y-Z-3′ formula) are high-affinity modified nucleosides. In some embodiments, each nucleoside in the 5′wing region of the gapmer (X in the 5′-X-Y-Z-3′ formula) is a high-affinity modified nucleoside and each nucleoside in the 3′wing region of the gapmer (Z in the 5′-X-Y-Z-3′ formula) is high-affinity modified nucleoside.

[0231] In some embodiments, the 5′wing region of the gapmer (X in the 5′-X-Y-Z-3′ formula) comprises the same high affinity nucleosides as the 3′wing region of the gapmer (Z in the 5′-X-Y-Z-3′ formula). For example, the 5′wing region of the gapmer (X in the 5′-X-Y-Z-3′ formula) and the 3′wing region of the gapmer (Z in the 5′-X-Y-Z-3′ formula) may comprise one or more non-bicyclic 2′-modified nucleosides (e.g., 2′-MOE or 2′-O-Me). In another example, the 5′wing region of the gapmer (X in the 5′-X-Y-Z-3′ formula) and the 3′wing region of the gapmer (Z in the 5′-X-Y-Z-3′ formula) may comprise one or more 2′-4′ bicyclic nucleosides (e.g., LNA or cEt). In some embodiments, each nucleoside in the 5′wing region of the gapmer (X in the 5′-X-Y-Z-3′ formula) and the 3′wing region of the gapmer (Z in the 5′-X-Y-Z-3′ formula) is a non-bicyclic 2′-modified nucleosides (e.g., 2′-MOE or 2′-O-Me). In some embodiments, each nucleoside in the 5′wing region of the gapmer (X in the 5′-X-Y-Z-3′ formula) and the 3′wing region of the gapmer (Z in the 5′-X-Y-Z-3′ formula) is a 2′-4′ bicyclic nucleosides (e.g., LNA or cEt).

[0232] In some embodiments, the gapmer comprises a 5′-X-Y-Z-3′ configuration, wherein X and Z is independently 1-7 (e.g., 1, 2, 3, 4, 5, 6, or 7) nucleosides in length and Y is 6-10 (e.g., 6, 7, 8, 9, or 10) nucleosides in length, wherein each nucleoside in X and Z is a non-bicyclic 2′-modified nucleosides (e.g., 2′-MOE or 2′-O-Me) and each nucleoside in Y is a 2′-deoxyribonucleoside. In some embodiments, the gapmer comprises a 5′-X-Y-Z-3′ configuration, wherein X and Z is independently 1-7 (e.g., 1, 2, 3, 4, 5, 6, or 7) nucleosides in length and Y is 6-10 (e.g., 6, 7, 8, 9, or 10) nucleosides in length, wherein each nucleoside in X and Z is a 2′-4′ bicyclic nucleosides (e.g., LNA or cEt) and each nucleoside in Y is a 2′-deoxyribonucleoside. In some embodiments, the 5′wing region of the gapmer (X in the 5′-X-Y-Z-3′ formula) comprises different high affinity nucleosides as the 3′wing region of the gapmer (Z in the 5′-X-Y-Z-3′ formula). For example, the 5′wing region of the gapmer (X in the 5′-X-Y-Z-3′ formula) may comprise one or more non-bicyclic 2′-modified nucleosides (e.g., 2′-MOE or 2′-O-Me) and the 3′wing region of the gapmer (Z in the 5′-X-Y-Z-3′ formula) may comprise one or more 2′-4′ bicyclic nucleosides (e.g., LNA or cEt). In another example, the 3′wing region of the gapmer (Z in the 5′-X-Y-Z-3′ formula) may comprise one or more non-bicyclic 2′-modified nucleosides (e.g., 2′-MOE or 2′-O-Me) and the 5′wing region of the gapmer (X in the 5′-X-Y-Z-3′ formula) may comprise one or more 2′-4′ bicyclic nucleosides (e.g., LNA or cEt).

[0233] In some embodiments, the gapmer comprises a 5′-X-Y-Z-3′ configuration, wherein X and Z is independently 1-7 (e.g., 1, 2, 3, 4, 5, 6, or 7) nucleosides in length and Y is 6-10 (e.g., 6, 7, 8, 9, or 10) nucleosides in length, wherein each nucleoside in X is a non-bicyclic 2′-modified nucleosides (e.g., 2′-MOE or 2′-O-Me), each nucleoside in Z is a 2′-4′ bicyclic nucleosides (e.g., LNA or cEt), and each nucleoside in Y is a 2′-deoxyribonucleoside. In some embodiments, the gapmer comprises a 5′-X-Y-Z-3′ configuration, wherein X and Z is independently 1-7 (e.g., 1, 2, 3, 4, 5, 6, or 7) nucleosides in length and Y is 6-10 (e.g., 6, 7, 8, 9, or 10) nucleosides in length, wherein each nucleoside in X is a 2′-4′ bicyclic nucleosides (e.g., LNA or cEt), each nucleoside in Z is a non-bicyclic 2′-modified nucleosides (e.g., 2′-MOE or 2′-O-Me) and each nucleoside in Y is a 2′-deoxyribonucleoside.

[0234] In some embodiments, the 5′wing region of the gapmer (X in the 5′-X-Y-Z-3′ formula) comprises one or more non-bicyclic 2′-modified nucleosides (e.g., 2′-MOE or 2′-O-Me) and one or more 2′-4′ bicyclic nucleosides (e.g., LNA or cEt). In some embodiments, the 3′wing region of the gapmer (Z in the 5′-X-Y-Z-3′ formula) comprises one or more non-bicyclic 2′-modified nucleosides (e.g., 2′-MOE or 2′-O-Me) and one or more 2′-4′ bicyclic nucleosides (e.g., LNA or cEt). In some embodiments, both the 5′wing region of the gapmer (X in the 5′-X—Y-Z-3′ formula) and the 3′wing region of the gapmer (Z in the 5′-X-Y-Z-3′ formula) comprise one or more non-bicyclic 2′-modified nucleosides (e.g., 2′-MOE or 2′-O-Me) and one or more 2′-4′ bicyclic nucleosides (e.g., LNA or cEt).

[0235] In some embodiments, the gapmer comprises a 5′-X-Y-Z-3′ configuration, wherein X and Z is independently 2-7 (e.g., 2, 3, 4, 5, 6, or 7) nucleosides in length and Y is 6-10 (e.g., 6, 7, 8, 9, or 10) nucleosides in length, wherein at least one but not all (e.g., 1, 2, 3, 4, 5, or 6) of positions 1, 2, 3, 4, 5, 6, or 7 in X (the 5′ most position is position 1) is a non-bicyclic 2′-modified nucleoside (e.g., 2′-MOE or 2′-O-Me), wherein the rest of the nucleosides in both X and Z are 2′-4′ bicyclic nucleosides (e.g., LNA or cEt), and wherein each nucleoside in Y is a 2′deoxyribonucleoside. In some embodiments, the gapmer comprises a 5′-X-Y-Z-3′ configuration, wherein X and Z is independently 2-7 (e.g., 2, 3, 4, 5, 6, or 7) nucleosides in length and Y is 6-10 (e.g., 6, 7, 8, 9, or 10) nucleosides in length, wherein at least one but not all (e.g., 1, 2, 3, 4, 5, or 6) of positions 1, 2, 3, 4, 5, 6, or 7 in Z (the 5′ most position is position 1) is a non-bicyclic 2′-modified nucleoside (e.g., 2′-MOE or 2′-O-Me), wherein the rest of the nucleosides in both X and Z are 2′-4′ bicyclic nucleosides (e.g., LNA or cEt), and wherein each nucleoside in Y is a 2′deoxyribonucleoside. In some embodiments, the gapmer comprises a 5′-X-Y-Z-3′ configuration, wherein X and Z is independently 2-7 (e.g., 2, 3, 4, 5, 6, or 7) nucleosides in length and Y is 6-10 (e.g., 6, 7, 8, 9, or 10) nucleosides in length, wherein at least one but not all (e.g., 1, 2, 3, 4, 5, or 6) of positions 1, 2, 3, 4, 5, 6, or 7 in X and at least one of positions but not all (e.g., 1, 2, 3, 4, 5, or 6) 1, 2, 3, 4, 5, 6, or 7 in Z (the 5′ most position is position 1) is a non-bicyclic 2′-modified nucleoside (e.g., 2′-MOE or 2′-O-Me), wherein the rest of the nucleosides in both X and Z are 2′-4′ bicyclic nucleosides (e.g., LNA or cEt), and wherein each nucleoside in Y is a 2′deoxyribonucleoside.

[0236] Non-limiting examples of gapmers configurations with a mix of non-bicyclic 2′-modified nucleoside (e.g., 2′-MOE or 2′-O-Me) and 2′-4′ bicyclic nucleosides (e.g., LNA or cEt) in the 5′wing region of the gapmer (X in the 5′-X-Y-Z-3′ formula) and/or the 3′wing region of the gapmer (Z in the 5′-X-Y-Z-3′ formula) include: BBB-(D)n-BBBAA; KKK-(D)n-KKKAA; LLL-(D)n-LLLAA; BBB-(D)n-BBBEE; KKK-(D)n-KKKEE; LLL-(D)n-LLLEE; BBB-(D)n-BBBAA; KKK-(D)n-KKKAA; LLL-(D)n-LLLAA; BBB-(D)n-BBBEE; KKK-(D)n-KKKEE; LLL-(D)n-LLLEE; BBB-(D)n-BBBAAA; KKK-(D)n-KKKAAA; LLL-(D)n-LLLAAA; BBB-(D)n-BBBEEE; KKK-(D)n-KKKEEE; LLL-(D)n-LLLEEE; BBB-(D)n-BBBAAA; KKK-(D)n-KKKAAA; LLL-(D)n-LLLAAA; BBB-(D)n-BBBEEE; KKK-(D)n-KKKEEE; LLL-(D)n-LLLEEE; BABA-(D)n-ABAB; KAKA-(D)n-AKAK; LALA-(D)n-ALAL; BEBE-(D)n-EBEB; KEKE-(D)n-EKEK; LELE-(D)n-ELEL; BABA-(D)n-ABAB; KAKA-(D)n-AKAK; LALA-(D)n-ALAL; BEBE-(D)n-EBEB; KEKE-(D)n-EKEK; LELE-(D)n-ELEL; ABAB-(D)n-ABAB; AKAK-(D)n-AKAK; ALAL-(D)n-ALAL; EBEB-(D)n-EBEB; EKEK-(D)n-EKEK; ELEL-(D)n-ELEL; ABAB-(D)n-ABAB; AKAK-(D)n-AKAK; ALAL-(D)n-ALAL; EBEB-(D)n-EBEB; EKEK-(D)n-EKEK; ELEL-(D)n-ELEL; AABB-(D)n-BBAA; BBAA-(D)n-AABB; AAKK-(D)n-KKAA; AALL-(D)n-LLAA; EEBB-(D)n-BBEE; EEKK-(D)n-KKEE; EELL-(D)n-LLEE; AABB-(D)n-BBAA; AAKK-(D)n-KKAA; AALL-(D)n-LLAA; EEBB-(D)n-BBEE; EEKK-(D)n-KKEE; EELL-(D)n-LLEE; BBB-(D)n-BBA; KKK-(D)n-KKA; LLL-(D)n-LLA; BBB-(D)n-BBE; KKK-(D)n-KKE; LLL-(D)n-LLE; BBB-(D)n-BBA; KKK-(D)n-KKA; LLL-(D)n-LLA; BBB-(D)n-BBE; KKK-(D)n-KKE; LLL-(D)n-LLE; BBB-(D)n-BBA; KKK-(D)n-KKA; LLL-(D)n-LLA; BBB-(D)n-BBE; KKK-(D)n-KKE; LLL-(D)n-LLE; ABBB-(D)n-BBBA; AKKK-(D)n-KKKA; ALLL-(D)n-LLLA; EBBB-(D)n-BBBE; EKKK-(D)n-KKKE; ELLL-(D)n-LLLE; ABBB-(D)n-BBBA; AKKK-(D)n-KKKA; ALLL-(D)n-LLLA; EBBB-(D)n-BBBE; EKKK-(D)n-KKKE; ELLL-(D)n-LLLE; ABBB-(D)n-BBBAA; AKKK-(D)n-KKKAA; ALLL-(D)n-LLLAA; EBBB-(D)n-BBBEE; EKKK-(D)n-KKKEE; ELLL-(D)n-LLLEE; ABBB-(D)n-BBBAA; AKKK-(D)n-KKKAA; ALLL-(D)n-LLLAA; EBBB-(D)n-BBBEE; EKKK-(D)n-KKKEE; ELLL-(D)n-LLLEE; AABBB-(D)n-BBB; AAKKK-(D)n-KKK; AALLL-(D)n-LLL; EEBBB-(D)n-BBB; EEKKK-(D)n-KKK; EELLL-(D)n-LLL; AABBB-(D)n-BBB; AAKKK-(D)n-KKK; AALLL-(D)n-LLL; EEBBB-(D)n-BBB; EEKKK-(D)n-KKK; EELLL-(D)n-LLL; AABBB-(D)n-BBBA; AAKKK-(D)n-KKKA; AALLL-(D)n-LLLA; EEBBB-(D)n-BBBE; EEKKK-(D)n-KKKE; EELLL-(D)n-LLLE; AABBB-(D)n-BBBA; AAKKK-(D)n-KKKA; AALLL-(D)n-LLLA; EEBBB-(D)n-BBBE; EEKKK-(D)n-KKKE; EELLL-(D)n-LLLE; ABBAABB-(D)n-BB; AKKAAKK-(D)n-KK; ALLAALLL-(D)n-LL; EBBEEBB-(D)n-BB; EKKEEKK-(D)n-KK; ELLEELL-(D)n-LL; ABBAABB-(D)n-BB; AKKAAKK-(D)n-KK; ALLAALL-(D)n-LL; EBBEEBB-(D)n-BB; EKKEEKK-(D)n-KK; ELLEELL-(D)n-LL; ABBABB-(D)n-BBB; AKKAKK-(D)n-KKK; ALLALLL-(D)n-LLL; EBBEBB-(D)n-BBB; EKKEKK-(D)n-KKK; ELLELL-(D)n-LLL; ABBABB-(D)n-BBB; AKKAKK-(D)n-KKK; ALLALL-(D)n-LLL; EBBEBB-(D)n-BBB; EKKEKK-(D)n-KKK; ELLELL-(D)n-LLL; EEEK-(D)n-EEEEEEEE; EEK-(D)n-EEEEEEEEE; EK-(D)n-EEEEEEEEEE; EK-(D)n-EEEKK; K-(D)n-EEEKEKE; K-(D)n-EEEKEKEE; K-(D)n-EEKEK; EK-(D)n-EEEEKEKE; EK-(D)n-EEEKEK; EEK-(D)n-KEEKE; EK-(D)n-EEKEK; EK-(D)n-KEEK; EEK-(D)n-EEEKEK; EK-(D)n-KEEEKEE; EK-(D)n-EEKEKE; EK-(D)n-EEEKEKE; and EK-(D)n-EEEEKEK. “A” nucleosides comprise a 2′-modified nucleoside; “B” represents a 2′-4′ bicyclic nucleoside; “K” represents a constrained ethyl nucleoside (cEt); “L” represents an LNA nucleoside; and “E” represents a 2′-MOE modified ribonucleoside; “D” represents a 2′-deoxyribonucleoside; “n” represents the length of the gap segment (Y in the 5′-X-Y-Z-3′ configuration) and is an integer between 1-20.
[0237] In some embodiments, any one of the gapmers described herein comprises one or more modified nucleoside linkages (e.g., a phosphorothioate linkage) in each of the X, Y, and Z regions. In some embodiments, each internucleoside linkage in the any one of the gapmers described herein is a phosphorothioate linkage. In some embodiments, each of the X, Y, and Z regions independently comprises a mix of phosphorothioate linkages and phosphodiester linkages. In some embodiments, each internucleoside linkage in the gap region Y is a phosphorothioate linkage, the 5′wing region X comprises a mix of phosphorothioate linkages and phosphodiester linkages, and the 3′wing region Z comprises a mix of phosphorothioate linkages and phosphodiester linkages.
   h. RNA Interference (RNAi)

[0238] In some embodiments, the GYS1-targeting oligonucleotides provided herein are small interfering RNAs (siRNA), also known as short interfering RNA or silencing RNA. SiRNA, is a class of double-stranded RNA molecules, typically about 20-25 base pairs in length that target nucleic acids (e.g., mRNAs) for degradation via the RNA interference (RNAi) pathway in cells. Specificity of siRNA molecules may be determined by the binding of the antisense strand of the molecule to its target RNA. Effective siRNA molecules are generally less than 30 to 35 base pairs in length to prevent the triggering of non-specific RNA interference pathways in the cell via the interferon response, although longer siRNA can also be effective. In some embodiments, the siRNA molecules are 7, 8, 9, 10, 11, 12, 13, 14, 15, 16, 17, 18, 19, 20, 21, 22, 23, 24, 25, 26, 27, 28, 29, 30, 35, 40, 45, 50, or more base pairs in length. In some embodiments, the siRNA molecules are 8 to 30 base pairs in length, 10 to 15 base pairs in length, 10 to 20 base pairs in length, 15 to 25 base pairs in length, 19 to 21 base pairs in length, 21 to 23 base pairs in length.

[0239] Following selection of an appropriate target RNA sequence, siRNA molecules that comprise a nucleotide sequence complementary to all or a portion of the target sequence, i.e., an antisense sequence, can be designed and prepared using appropriate methods (see, e.g., PCT Publication Number WO 2004/016735; and U.S. Patent Publication Nos. 2004/0077574 and 2008/0081791).

[0240] The siRNA molecule can be double stranded (i.e., a dsRNA molecule comprising an antisense strand and a complementary sense strand) or single-stranded (i.e., an ssRNA molecule comprising just an antisense strand). The siRNA molecules can comprise a duplex, asymmetric duplex, hairpin or asymmetric hairpin secondary structure, having self-complementary sense and antisense strands. In some embodiments, the GYS1-targeting oligonucleotide described herein is an siRNA comprising an antisense strand and a sense strand.

[0241] In some embodiments, the antisense strand of the siRNA molecule is 7, 8, 9, 10, 11, 12, 13, 14, 15, 16, 17, 18, 19, 20, 21, 22, 23, 24, 25, 26, 27, 28, 29, 30, 35, 40, 45, 50, or more nucleotides in length. In some embodiments, the antisense strand is 8 to 50 nucleotides in length, 8 to 40 nucleotides in length, 8 to 30 nucleotides in length, 10 to 15 nucleotides in length, 10 to 20 nucleotides in length, 15 to 25 nucleotides in length, 19 to 21 nucleotides in length, 21 to 23 nucleotides in lengths.

[0242] In some embodiments, the sense strand of the siRNA molecule is 7, 8, 9, 10, 11, 12, 13, 14, 15, 16, 17, 18, 19, 20, 21, 22, 23, 24, 25, 26, 27, 28, 29, 30, 35, 40, 45, 50, or more nucleotides in length. In some embodiments, the sense strand is 8 to 50 nucleotides in length, 8 to 40 nucleotides in length, 8 to 30 nucleotides in length, 10 to 15 nucleotides in length, 10 to 20 nucleotides in length, 15 to 25 nucleotides in length, 19 to 21 nucleotides in length, 21 to 23 nucleotides in lengths.

[0243] In some embodiments, siRNA molecules comprise an antisense strand comprising a region of complementarity to a target region in a GYS1 mRNA. In some embodiments, the region of complementarity is at least 80%, at least 85%, at least 90%, at least 91%, at least 92%, at least 93%, at least 94%, at least 95%, at least 96%, at least 97%, at least 98%, at least 99% or 100% complementary to a target region in a GYS1 mRNA. In some embodiments, the target region is a region of consecutive nucleotides in the GYS1 mRNA. In some embodiments, a complementary nucleotide sequence need not be 100% complementary to that of its target to be specifically hybridizable or specific for a target RNA sequence.

[0244] In some embodiments, siRNA molecules comprise an antisense strand that comprises a region of complementarity to a GYS1 mRNA sequence and the region of complementarity is in the range of 8 to 15, 8 to 30, 8 to 40, or 10 to 50, or 5 to 50, or 5 to 40 nucleotides in length. In some embodiments, a region of complementarity is 5, 6, 7, 8, 9, 10, 11, 12, 13, 14, 15, 16, 17, 18, 19, 20, 21, 22, 23, 24, 25, 26, 27, 28, 29, 30, 31, 32, 33, 34, 35, 36, 37, 38, 39, 40, 41, 42, 43, 44, 45, 46, 47, 48, 49, or 50 nucleotides in length. In some embodiments, the region of complementarity is complementary with at least 6, at least 7, at least 8, at least 9, at least 10, at least 11, at least 12, at least 13, at least 14, at least 15, at least 16, at least 17, at least 18, at least 19, at least 20, at least 21, at least 22, at least 23, at least 24, at least 25 or more consecutive nucleotides of a GYS1 mRNA sequence. In some embodiments, the region of complementarity comprises a nucleotide sequence that contains no more than 1, 2, 3, 4, or 5 base mismatches compared to the complementary portion of a GYS1 mRNA sequence. In some embodiments, the region of complementarity comprises a nucleotide sequence that has up to 3 mismatches over 15 bases, or up to 2 mismatches over 10 bases.

[0245] In some embodiments, siRNA molecules comprise an antisense strand comprising a nucleotide sequence that is complementary (e.g., at least 85%, at least 90%, at least 95%, or 100%) to a target RNA sequence as set forth in any one of SEQ ID NOs: 162-186. In some embodiments, siRNA molecules comprise an antisense strand of 18-25 nucleotides in length and comprising a region of complementarity of at least 15 nucleotides (e.g., at least 15 nucleotides, at least 16 nucleotides, at least 17 nucleotides, at least 18 nucleotides, or at least 19 nucleotides) to a target RNA sequence as set forth in any one of SEQ ID NOs: 162-186.

[0246] In some embodiments, siRNA molecules comprise an antisense strand comprising a nucleotide sequence that is at least 85%, at least 90%, at least 95%, or 100% identical to the oligonucleotides as set forth in any one of SEQ ID NOs: 212-236. In some embodiments, siRNA molecules comprise an antisense strand of 18-25 nucleotides in length and comprising at least 6, at least 7, at least 8, at least 9, at least 10, at least 11, at least 12, at least 13, at least 14, at least 15, at least 16, at least 17, at least 18, at least 19, at least 20, at least 21, at least 22, or at least 23 consecutive nucleotides of the oligonucleotides as set forth in any one of SEQ ID NOs: 212-236.

[0247] Double-stranded siRNA may comprise RNA strands that are the same length or different lengths. Double-stranded siRNA molecules can also be assembled from a single oligonucleotide in a stem-loop structure, wherein self-complementary sense and antisense regions of the siRNA molecule are linked by means of a nucleic acid based or non-nucleic acid-based linker(s), as well as circular single-stranded RNA having two or more loop structures and a stem comprising self-complementary sense and antisense strands, wherein the circular RNA can be processed either in vivo or in vitro to generate an active siRNA molecule capable of mediating RNAi. Small hairpin RNA (shRNA) molecules thus are also contemplated herein. These molecules comprise a specific antisense sequence in addition to the reverse complement (sense) sequence, typically separated by a spacer or loop sequence. Cleavage of the spacer or loop provides a single-stranded RNA molecule and its reverse complement, such that they may anneal to form a dsRNA molecule (optionally with additional processing steps that may result in addition or removal of one, two, three or more nucleotides from the 3′ end and/or (e.g., and) the 5′ end of either or both strands). A spacer can be of a sufficient length to permit the antisense and sense sequences to anneal and form a double-stranded structure (or stem) prior to cleavage of the spacer (and, optionally, subsequent processing steps that may result in addition or removal of one, two, three, four, or more nucleotides from the 3′ end and/or (e.g., and) the 5′ end of either or both strands). A spacer sequence may be an unrelated nucleotide sequence that is situated between two complementary nucleotide sequence regions which, when annealed into a double-stranded nucleic acid, comprise a shRNA.

[0248] The overall length of the siRNA molecules can vary from about 14 to about 100 nucleotides depending on the type of siRNA molecule being designed. Generally between about 14 and about 50 of these nucleotides are complementary to the RNA target sequence, i.e. constitute the specific antisense sequence of the siRNA molecule. For example, when the siRNA is a double- or single-stranded siRNA, the length can vary from about 14 to about 50 nucleotides, whereas when the siRNA is a shRNA or circular molecule, the length can vary from about 40 nucleotides to about 100 nucleotides.

[0249] An siRNA molecule may comprise a 3′ overhang at one end of the molecule. The other end may be blunt-ended or have also an overhang (5′ or 3′). When the siRNA molecule comprises an overhang at both ends of the molecule, the length of the overhangs may be the same or different. In one embodiment, the siRNA molecule of the present disclosure comprises 3′ overhangs of about 1 to about 3 (e.g., 1, 2, 3) nucleotides on both ends of the molecule. In some embodiments, the siRNA molecule comprises 3′ overhangs of about 1 to about 3 nucleotides on the sense strand. In some embodiments, the siRNA molecule comprises 3′ overhangs of about 1 to about 3 (e.g., 1, 2, 3) nucleotides on the antisense strand. In some embodiments, the siRNA molecule comprises 3′ overhangs of about 1 to about 3 (e.g., 1, 2, 3) nucleotides on both the sense strand and the antisense strand.

[0250] In some embodiments, the siRNA molecule comprises one or more modified nucleosides (e.g., 1, 2, 3, 4, 5, 6, 7, 8, 9, 10 or more). In some embodiments, the siRNA molecule comprises one or more modified nucleosides and/or (e.g., and) one or more modified internucleoside linkages. In some embodiments, the modified nucleotide is a modified sugar moiety (e.g., a 2′ modified nucleotide). In some embodiments, the siRNA molecule comprises one or more 2′ modified nucleosides, e.g., a 2′-deoxy, 2′-fluoro (2′-F), 2′-O-methyl (2′-O-Mc), 2′-O-methoxyethyl (2′-MOE), 2′-O-aminopropyl (2′-O-AP), 2′-O-dimethylaminoethyl (2′-O-DMAOE), 2′-O-dimethylaminopropyl (2′-O-DMAP), 2′-O-dimethylaminoethyloxyethyl (2′-O-DMAEOE), or 2′-O—N-methylacetamido (2′-O-NMA). In some embodiments, each nucleoside of the siRNA molecule is a modified nucleoside (e.g., a 2′-modified nucleoside). In some embodiments, the siRNA molecule comprises one or more 2′-O-methyl modified nucleosides. In some embodiments, the siRNA molecule comprises one or more 2′-F modified nucleosides. In some embodiments, the siRNA molecule comprises one or more 2′-O-methyl and 2′-F modified nucleosides.

[0251] In some embodiments, the siRNA molecule contains a phosphorothioate or other modified internucleoside linkage. In some embodiments, the siRNA molecule comprises phosphorothioate internucleoside linkages. In some embodiments, the siRNA molecule comprises phosphorothioate internucleoside linkages between at least two nucleotides. In some embodiments, the siRNA molecule comprises phosphorothioate internucleoside linkages between all nucleotides. For example, in some embodiments, the siRNA molecule comprises modified internucleoside linkages at the first, second, and/or (e.g., and) third internucleoside linkage at the 5′ or 3′ end of the siRNA molecule.

[0252] In some embodiments, the modified internucleoside linkages are phosphorus-containing linkages. In some embodiments, phosphorus-containing linkages that may be used include, but are not limited to, phosphorothioates, chiral phosphorothioates, phosphorodithioates, phosphotriesters, aminoalkylphosphotriesters, methyl and other alkyl phosphonates comprising 3′ alkylene phosphonates and chiral phosphonates, phosphinates, phosphoramidates comprising 3′-amino phosphoramidate and aminoalkylphosphoramidates, thionophosphoramidates, thionoalkylphosphonates, thionoalkylphosphotriesters, and boranophosphates having normal 3′-5′ linkages, 2′-5′ linked analogs of these, and those having inverted polarity wherein the adjacent pairs of nucleoside units are linked 3′-5′ to 5′-3′ or 2′-5′ to 5′-2′; see U.S. Pat. Nos. 3,687,808; 4,469,863; 4,476,301; 5,023,243; 5,177,196; 5,188,897; 5,264,423; 5,276,019; 5,278,302; 5,286,717; 5,321,131; 5,399,676; 5,405,939; 5,453,496; 5,455, 233; 5,466,677; 5,476,925; 5,519,126; 5,536,821; 5,541,306; 5,550,111; 5,563, 253; 5,571,799; 5,587,361; and 5,625,050.

[0253] Any of the modified chemistries or formats of siRNA molecules described herein can be combined with each other. For example, one, two, three, four, five, or more different types of modifications can be included within the same siRNA molecule.

[0254] In some embodiments, the antisense strand comprises one or more modified nucleosides (e.g., 1, 2, 3, 4, 5, 6, 7, 8, 9, 10 or more). In some embodiments, the antisense strand comprises one or more modified nucleosides and/or (e.g., and) one or more modified internucleoside linkages. In some embodiments, the modified nucleotide comprises a modified sugar moiety (e.g., a 2′ modified nucleotide). In some embodiments, the antisense strand comprises one or more 2′ modified nucleosides, e.g., a 2′-deoxy, 2′-fluoro (2′-F), 2′-O-methyl (2′-O-Me), 2′-O-methoxyethyl (2′-MOE), 2′-O-aminopropyl (2′-O-AP), 2′-O-dimethylaminoethyl (2′-O-DMAOE), 2′-O-dimethylaminopropyl (2′-O-DMAP), 2′-O-dimethylaminoethyloxyethyl (2′-O-DMAEOE), or 2′-O-N-methylacetamido (2′-O-NMA). In some embodiments, each nucleoside of the antisense strand is a modified nucleoside (e.g., a 2′-modified nucleoside). In some embodiments, the antisense strand comprises one or more 2′-O-methyl modified nucleosides. In some embodiments, the antisense strand comprises one or more 2′-F modified nucleosides. In some embodiments, the antisense strand comprises one or more 2′-O-methyl and 2′-F modified nucleosides.

[0255] In some embodiments, antisense strand contains a phosphorothioate or other modified internucleoside linkage. In some embodiments, the antisense strand comprises phosphorothioate internucleoside linkages. In some embodiments, the antisense strand comprises phosphorothioate internucleoside linkages between at least two nucleosides. In some embodiments, the antisense strand comprises phosphorothioate internucleoside linkages between all nucleotides. For example, in some embodiments, the antisense strand comprises modified internucleoside linkages at the first, second, and/or (e.g., and) third internucleoside linkage at the 5′ or 3′ end of the siRNA molecule. In some embodiments, the two internucleoside linkages at the 3′ end of the antisense strands are phosphorothioate internucleoside linkages.

[0256] In some embodiments, the modified internucleotide linkages are phosphorus-containing linkages. In some embodiments, phosphorus-containing linkages that may be used include, but are not limited to, phosphorothioates, chiral phosphorothioates, phosphorodithioates, phosphotriesters, aminoalkylphosphotriesters, methyl and other alkyl phosphonates comprising 3′alkylene phosphonates and chiral phosphonates, phosphinates, phosphoramidates comprising 3′-amino phosphoramidate and aminoalkylphosphoramidates, thionophosphoramidates, thionoalkylphosphonates, thionoalkylphosphotriesters, and boranophosphates having normal 3′-5′ linkages, 2′-5′ linked analogs of these, and those having inverted polarity wherein the adjacent pairs of nucleoside units are linked 3′-5′ to 5′-3′ or 2′-5′ to 5′-2′; see U.S. Pat. Nos. 3,687,808; 4,469,863; 4,476,301; 5,023,243; 5,177,196; 5,188,897; 5,264,423; 5,276,019; 5,278,302; 5,286,717; 5,321,131; 5,399,676; 5,405,939; 5,453,496; 5,455, 233; 5,466,677; 5,476,925; 5,519,126; 5,536,821; 5,541,306; 5,550,111; 5,563, 253; 5,571,799; 5,587,361; and 5,625,050.

[0257] Any of the modified chemistries or formats of the antisense strand described herein can be combined with each other. For example, one, two, three, four, five, or more different types of modifications can be included within the same antisense strand.

[0258] In some embodiments, the sense strand comprises one or more modified nucleotides (e.g., 1, 2, 3, 4, 5, 6, 7, 8, 9, 10 or more). In some embodiments, the sense strand comprises one or more modified nucleotides and/or (e.g., and) one or more modified internucleotide linkages. In some embodiments, the modified nucleotide is a modified sugar moiety (e.g., a 2′ modified nucleotide). In some embodiments, the sense strand comprises one or more 2′ modified nucleotides, e.g., a 2′-deoxy, 2′-fluoro (2′-F), 2′-O-methyl (2′-O-Mc), 2′-O-methoxyethyl (2′-MOE), 2′-O-aminopropyl (2′-O-AP), 2′-O-dimethylaminoethyl (2′-O-DMAOE), 2′-O-dimethylaminopropyl (2′-O-DMAP), 2′-O-dimethylaminoethyloxyethyl (2′-O-DMAEOE), or 2′-O—N-methylacetamido (2′-O-NMA). In some embodiments, each nucleotide of the sense strand is a modified nucleotide (e.g., a 2′-modified nucleotide). In some embodiments, the sense strand comprises one or more phosphorodiamidate morpholinos. In some embodiments, the sense strand is a phosphorodiamidate morpholino oligomer (PMO). In some embodiments, the sense strand comprises one or more 2′-O-methyl modified nucleotides. In some embodiments, the sense strand comprises one or more 2′-F modified nucleotides. In some embodiments, the sense strand comprises one or more 2′-O-methyl and 2′-F modified nucleotides.

[0259] In some embodiments, the sense strand contains a phosphorothioate or other modified internucleotide linkage. In some embodiments, the sense strand comprises phosphorothioate internucleoside linkages. In some embodiments, the sense strand comprises phosphorothioate internucleoside linkages between at least two nucleotides. In some embodiments, the sense strand comprises phosphorothioate internucleoside linkages between all nucleotides. For example, in some embodiments, the sense strand comprises modified internucleotide linkages at the first, second, and/or (e.g., and) third internucleoside linkage at the 5′ or 3′ end of the sense strand. In some embodiments, the sense strand comprises phosphodiester internucleoside linkage. In some embodiments, the sense strand does not comprise phosphorothioate internucleoside linkage. In some embodiments, the modified internucleotide linkages are phosphorus-containing linkages. In some embodiments, phosphorus-containing linkages that may be used include, but are not limited to, phosphorothioates, chiral phosphorothioates, phosphorodithioates, phosphotriesters, aminoalkylphosphotriesters, methyl and other alkyl phosphonates comprising 3′alkylene phosphonates and chiral phosphonates, phosphinates, phosphoramidates comprising 3′-amino phosphoramidate and aminoalkylphosphoramidates, thionophosphoramidates, thionoalkylphosphonates, thionoalkylphosphotriesters, and boranophosphates having normal 3′-5′ linkages, 2′-5′ linked analogs of these, and those having inverted polarity wherein the adjacent pairs of nucleoside units are linked 3′-5′ to 5′-3′ or 2′-5′ to 5′-2′; see U.S. Pat. Nos. 3,687,808; 4,469,863; 4,476,301; 5,023,243; 5,177,196; 5,188,897; 5,264,423; 5,276,019; 5,278,302; 5,286,717; 5,321,131; 5,399,676; 5,405,939; 5,453,496; 5,455, 233; 5,466,677; 5,476,925; 5,519,126; 5,536,821; 5,541,306; 5,550,111; 5,563, 253; 5,571,799; 5,587,361; and 5,625,050.

[0260] Any of the modified chemistries or formats of the sense strand described herein can be combined with each other. For example, one, two, three, four, five, or more different types of modifications can be included within the same sense strand.

[0261] In some embodiments, the antisense or sense strand of the siRNA molecule comprises modifications that enhance or reduce RNA-induced silencing complex (RISC) loading. In some embodiments, the antisense strand of the siRNA molecule comprises modifications that enhance RISC loading. In some embodiments, the sense strand of the siRNA molecule comprises modifications that reduce RISC loading and reduce off-target effects. In some embodiments, the antisense strand of the siRNA molecule comprises a 2′-methoxyethyl (2′-MOE) modification. The addition of the 2′-methoxyethyl (2′-MOE) group at the cleavage site improves both the specificity and silencing activity of siRNAs by facilitating the oriented RNA-induced silencing complex (RISC) loading of the modified strand, as described in Song et al., (2017) Mol Ther Nucleic Acids 9:242-250, incorporated herein by reference in its entirety. In some embodiments, the antisense strand of the siRNA molecule comprises a 2′-O-Me-phosphorodithioate modification, which increases RISC loading as described in Wu et al., (2014) Nat Commun 5:3459, incorporated herein by reference in its entirety.

[0262] In some embodiments, the sense strand of the siRNA molecule comprises a 5′-morpholino, which reduces RISC loading of the sense strand and improves antisense strand selection and RNAi activity, as described in Kumar et al., (2019) Chem Commun (Camb) 55(35):5139-5142, incorporated herein by reference in its entirety. In some embodiments, the sense strand of the siRNA molecule is modified with a synthetic RNA-like high affinity nucleotide analogue, Locked Nucleic Acid (LNA), which reduces RISC loading of the sense strand and further enhances antisense strand incorporation into RISC, as described in Elman et al., (2005) Nucleic Acids Res. 33(1): 439-447, incorporated herein by reference in its entirety. In some embodiments, the sense strand of the siRNA molecule comprises a 5′ unlocked nucleic acid (UNA) modification, which reduce RISC loading of the sense strand and improve silencing potency of the antisense strand, as described in Snead et al., (2013) Mol Ther Nucleic Acids 2(7):e 103, incorporated herein by reference in its entirety. In some embodiments, the sense strand of the siRNA molecule comprises a 5-nitroindole modification, which decreases the RNAi potency of the sense strand and reduces off-target effects as described in Zhang et al., (2012) Chembiochem 13(13): 1940-1945, incorporated herein by reference in its entirety. In some embodiments, the sense strand comprises a 2′-O′methyl (2′-O-Me) modification, which reduces RISC loading and the off-target effects of the sense strand, as described in Zheng et al., FASEB (2013) 27(10): 4017-4026, incorporated herein by reference in its entirety. In some embodiments, the sense strand of the siRNA molecule is fully substituted with morpholino, 2′-MOE or 2′-O-Me residues, and are not recognized by RISC as described in Kole et al., (2012) Nature reviews. Drug Discovery 11(2):125-140, incorporated herein by reference in its entirety. In some embodiments the antisense strand of the siRNA molecule comprises a MOE modification and the sense strand comprises a 2′-O-Me modification (see e.g., Song et al., (2017) Mol Ther Nucleic Acids 9:242-250). In some embodiments at least one (e.g., at least 2, at least 3, at least 4, at least 5, at least 10) siRNA molecule is linked (e.g., covalently) to a muscle-targeting agent. In some embodiments, the muscle-targeting agent may comprise, or consist of, a nucleic acid (e.g., DNA or RNA), a peptide (e.g., an antibody), a lipid (e.g., a microvesicle), or a sugar moiety (e.g., a polysaccharide). In some embodiments, the muscle-targeting agent is an antibody. In some embodiments, the muscle-targeting agent is an anti-transferrin receptor antibody (e.g., any one of the anti-TfR1 antibodies provided in Tables 2-7). In some embodiments, the muscle-targeting agent may be covalently linked to the 5′ end of the sense strand of the siRNA molecule. In some embodiments, the muscle-targeting agent may be covalently linked to the 3′ end of the sense strand of the siRNA molecule. In some embodiments, the muscle-targeting agent may be covalently linked internally to the sense strand of the siRNA molecule. In some embodiments, the muscle-targeting agent may be covalently linked to the 5′ end of the antisense strand of the siRNA molecule. In some embodiments, the muscle-targeting agent may be covalently linked to the 3′ end of the antisense strand of the siRNA molecule. In some embodiments, the muscle-targeting agent may be covalently linked internally to the antisense strand of the siRNA molecule.

[0263] Non limiting examples of GYS1-targeting siRNAs are provided in Table 8.

TABLE 8
GYS1-targeting oligonucleotides

| | Target | | | | | | |
|---|---|---|---|---|---|---|---|
| | start | | | | | | |
| | position | | | | | | |
| | in | | | | | | |
| | NM_002103.4 | | SEQ | | SEQ | | SEQ |
| siRNA | (SEQ ID NO: | Target | ID | | ID | Antisense | ID |
| No. | 160) | Sequence | NO | Sense strand | NO | strand | NO |
| 1 | 291 | ACTGGGAGG | 162 | Unmodified: | 187 | Unmodified: | 212 |
| | | ATGAATTCGA | | GGACUGGGAGGA | | UCGAAUUCAUC | |
| | | | | UGAAUUCGA | | CUCCCAGUCCUC | |
| | | | | Modified: | | Modified: | |
| | | | | mGmGfAmCfUmGfG | | fUfCmGfAmAfUm | |
| | | | | mGfAmGfGmAfUmG | | UfCmAfUmCfCmU | |
| | | | | fAmAfUmUfCmGfA | | fCmCfCmAfGmUf | |
| | | | | | | CmC*fU*mC | |
| 2 | 292 | CTGGGAGGAT | 163 | Unmodified: | 188 | Unmodified: | 213 |
| | | GAATTCGAC | | GACUGGGAGGAU | | GUCGAAUUCAU | |
| | | | | GAAUUCGAC | | CCUCCCAGUCCU | |
| | | | | Modified: | | Modified: | |
| | | | | mGmAfCmUfGmGfG | | fGfUmCfGmAfAm | |
| | | | | mAfGmGfAmUfGmA | | UfUmCfAmUfCmC | |
| | | | | fAmUfUmCfGmAfC | | fUmCfCmCfAmGf | |
| | | | | | | UmC*fC*mU | |
| 3 | 354 | ACAAGGTGG | 164 | Unmodified: | 189 | Unmodified: | 214 |
| | | GTGGCATCTA | | UAACAAGGUG | | UAGAUGCCACC | |
| | | | | GGUGGCAUCU | | CACCUUGUUAG | |
| | | | | A | | C | |
| | | | | Modified: | | Modified: | |
| | | | | mUmAfAmCfAmAfG | | fUfAmGfAmUfGm | |
| | | | | mGfUmGfGmGfUmG | | CfCmAfCmCfCmA | |
| | | | | fGmCfAmUfCmUfA | | fCmCfUmUfGmUf | |
| | | | | | | UmA*fG*mC | |
| 4 | 356 | AAGGTGGGTG | 165 | Unmodified: | 190 | Unmodified: | 215 |
| | | GCATCTACA | | ACAAGGUGGG | | UGUAGAUGCCA | |
| | | | | UGGCAUCUAC | | CCCACCUUGUU | |
| | | | | A | | A | |
| | | | | Modified: | | Modified: | |
| | | | | mAmCfAmAfGmGfU | | fUfGmUfAmGfAm | |
| | | | | mGfGmGfUmGfGmC | | UfGmCfCmAfCmC | |
| | | | | fAmUfCmUfAmCfA | | fCmAfCmCfUmUf | |
| | | | | | | GmU*fU*mA | |
| 5 | 379 | GCTGCAGACG | 166 | Unmodified: | 191 | Unmodified: | 216 |
| | | AAGGCGAAG | | GUGCUGCAGA | | CUUCGCCUUCG | |
| | | | | CGAAGGCGAA | | UCUGCAGCACC | |
| | | | | G | | G | |
| | | | | Modified: | | Modified: | |
| | | | | mGmUfGmCfUmGfC | | fCfUmUfCmGfCm | |
| | | | | mAfGmAfCmGfAmA | | CfUmUfCmGfUmC | |
| | | | | fGmGfCmGfAmAfG | | fUmGfCmAfGmCf | |
| | | | | | | AmC*fC*mG | |
| 6 | 381 | TGCAGACGAA | 167 | Unmodified: | 192 | Unmodified: | 217 |
| | | GGCGAAGGT | | GCUGCAGACGAAG | | ACCUUCGCCUUC | |
| | | | | GCGAAGGU | | GUCUGCAGCAC | |
| | | | | Modified: | | Modified: | |
| | | | | mGmCfUmGfCmAfG | | fAfCmCfUmUfCm | |
| | | | | mAfCmGfAmAfGmG | | GfCmCfUmUfCmG | |
| | | | | fCmGfAmAfGmGfU | | fUmCfUmGfCmAf | |
| | | | | | | GmC*fA*mC | |
| 7 | 383 | CAGACGAAG | 168 | Unmodified: | 193 | Unmodified: | 218 |
| | | GCGAAGGTG | | UGCAGACGAAGGC | | UCACCUUCGCCU | |
| | | A | | GAAGGUGA | | UCGUCUGCAGC | |
| | | | | Modified: | | Modified: | |
| | | | | mUmGfCmAfGmAfC | | fUfCmAfCmCfUm | |
| | | | | mGfAmAfGmGfCmG | | UfCmGfCmCfUmU | |
| | | | | fAmAfGmGfUmGfA | | fCmGfUmCfUmGf | |
| | | | | | | CmA*fG*mC | |
| 8 | 384 | AGACGAAGG | 169 | Unmodified: | 194 | Unmodified: | 219 |
| | | CGAAGGTGAC | | GCAGACGAAGGCG | | GUCACCUUCGCC | |
| | | | | AAGGUGAC | | UUCGUCUGCAG | |
| | | | | Modified: | | Modified: | |
| | | | | mGmCfAmGfAmCfG | | fGfUmCfAmCfCm | |
| | | | | mAfAmGfGmCfGmA | | UfUmCfGmCfCmU | |
| | | | | fAmGfGmUfGmAfC | | fUmCfGmUfCmUf | |
| | | | | | | GmC*fA*mG | |
| 9 | 516 | ATTCCATGAA | 170 | Unmodified: | 195 | Unmodified: | 220 |
| | | CAGCAAGGG | | GGAUUCCAUG | | CCCUUGCUGUU | |
| | | | | AACAGCAAGG | | CAUGGAAUCCA | |
| | | | | G | | G | |
| | | | | Modified: | | Modified: | |
| | | | | mGmGfAmUfUmCfC | | fCfCmCfUmUfGm | |
| | | | | mAfUmGfAmAfCmA | | CfUmGfUmUfCmA | |
| | | | | fGmCfAmAfGmGfG | | fUmGfGmAfAmUf | |
| | | | | | | CmC*fA*mG | |
| 10 | 896 | GACTTCTACA | 171 | Unmodified: | 196 | Unmodified: | 221 |
| | | ACAACCTGG | | UGGACUUCUA | | CCAGGUUGUUG | |
| | | | | CAACAACCUG | | UAGAAGUCCAC | |
| | | | | G | | G | |
| | | | | Modified: | | Modified: | |
| | | | | mUmGfGmAfCmUfU | | fCfCmAfGmGfUm | |
| | | | | mCfUmAfCmAfAmC | | UfGmUfUmGfUm | |
| | | | | fAmAfCmCfUmGfG | | AfGmAfAmGfUmC | |
| | | | | | | fCmA*fC*mG | |
| 11 | 1284 | GGCTCAACTA | 172 | Unmodified: | 197 | Unmodified: | 222 |
| | | TCTGCTCAG | | UCGGCUCAAC | | CUGAGCAGAUA | |
| | | | | UAUCUGCUCA | | GUUGAGCCGAG | |
| | | | | G | | C | |
| | | | | Modified: | | Modified: | |
| | | | | mUmCfGmGfCmUfC | | fCfUmGfAmGfCm | |
| | | | | mAfAmCfUmAfUmC | | AfGmAfUmAfGm | |
| | | | | fUmGfCmUfCmAfG | | UfUmGfAmGfCmC | |
| | | | | | | fGmA*fG*mC | |
| 12 | 1285 | GCTCAACTAT | 173 | Unmodified: | 198 | Unmodified: | 223 |
| | | CTGCTCAGA | | CGGCUCAACU | | UCUGAGCAGAU | |
| | | | | AUCUGCUCAG | | AGUUGAGCCGA | |
| | | | | A | | G | |
| | | | | Modified: | | Modified: | |
| | | | | mCmGfGmCfUmCfA | | fUfCmUfGmAfGm | |
| | | | | mAfCmUfAmUfCmU | | CfAmGfAmUfAmG | |
| | | | | fGmCfUmCfAmGfA | | fUmUfGmAfGmCf | |
| | | | | | | CmG*fA*mG | |
| 13 | 1288 | CAACTATCTG | 174 | Unmodified: | 199 | Unmodified: | 224 |
| | | CTCAGAGTG | | CUCAACUAUC | | CACUCUGAGCA | |
| | | | | UGCUCAGAGU | | GAUAGUUGAGC | |
| | | | | G | | C | |
| | | | | Modified: | | Modified: | |
| | | | | mCmUfCmAfAmCfU | | fCfAmCfUmCfUm | |
| | | | | mAfUmCfUmGfCmU | | GfAmGfCmAfGmA | |
| | | | | fCmAfGmAfGmUfG | | fUmAfGmUfUmGf | |
| | | | | | | AmG*fC*mC | |
| 14 | 1290 | ACTATCTGCT | 175 | Unmodified: | 200 | Unmodified: | 225 |
| | | CAGAGTGAA | | CAACUAUCUG | | UUCACUCUGAG | |
| | | | | CUCAGAGUGA | | CAGAUAGUUGA | |
| | | | | A | | G | |
| | | | | Modified: | | Modified: | |
| | | | | mCmAfAmCfUmAfU | | fUfUmCfAmCfUm | |
| | | | | mCfUmGfCmUfCmA | | CfUmGfAmGfCmA | |
| | | | | fGmAfGmUfGmAfA | | fGmAfUmAfGmUf | |
| | | | | | | UmG*fA*mG | |
| 15 | 1484 | GACATGAACA | 176 | Unmodified: | 201 | Unmodified: | 226 |
| | | AGATGCTGG | | CCGACAUGAA | | CCAGCAUCUUG | |
| | | | | CAAGAUGCUG | | UUCAUGUCGGG | |
| | | | | G | | A | |
| | | | | Modified: | | Modified: | |
| | | | | mCmCfGmAfCmAfU | | fCfCmAfGmCfAm | |
| | | | | mGfAmAfCmAfAmG | | UfCmUfUmGfUmU | |
| | | | | fAmUfGmCfUmGfG | | fCmAfUmGfUmCf | |
| | | | | | | GmG*fG*mA | |
| 16 | 1517 | ACTATGATGA | 177 | Unmodified: | 202 | Unmodified: | 227 |
| | | AGAGAGCCA | | UCACUAUGAUGA | | UGGCUCUCUUC | |
| | | | | AGAGAGCCA | | AUCAUAGUGAA | |
| | | | | | | G | |
| | | | | Modified: | | Modified: | |
| | | | | mUmCfAmCfUmAfU | | fUfGmGfCmUfCm | |
| | | | | mGfAmUfGmAfAmG | | UfCmUfUmCfAmU | |
| | | | | fAmGfAmGfCmCfA | | fCmAfUmAfGmUf | |
| | | | | | | GmA*fA*mG | |
| 17 | 1611 | TGACCACCAT | 178 | Unmodified: | 203 | Unmodified: | 228 |
| | | CCGCCGAAT | | CCUGACCACC | | AUUCGGCGGAU | |
| | | | | AUCCGCCGAA | | GGUGGUCAGGA | |
| | | | | U | | U | |
| | | | | Modified: | | Modified: | |
| | | | | mCmCfUmGfAmCfC | | fAfUmUfCmGfGm | |
| | | | | mAfCmCfAmUfCmC | | CfGmGfAmUfGmG | |
| | | | | fGmCfCmGfAmAfU | | fUmGfGmUfCmAf | |
| | | | | | | GmG*fA*mU | |
| 18 | 1853 | ATGGAGGAA | 179 | Unmodified: | 204 | Unmodified: | 229 |
| | | CACATCGCAG | | UCAUGGAGGA | | CUGCGAUGUGU | |
| | | | | ACACAUCGCA | | UCCUCCAUGAA | |
| | | | | G | | G | |
| | | | | Modified: | | Modified: | |
| | | | | mUmCfAmUfGmGfA | | fCfUmGfCmGfAm | |
| | | | | mGfGmAfAmCfAmC | | UfGmUfGmUfUmC | |
| | | | | fAmUfCmGfCmAfG | | fCmUfCmCfAmUf | |
| | | | | | | GmA*fA*mG | |
| 19 | 1854 | TGGAGGAAC | 180 | Unmodified: | 205 | Unmodified: | 230 |
| | | ACATCGCAGA | | CAUGGAGGAA | | UCUGCGAUGUG | |
| | | | | CACAUCGCAG | | UUCCUCCAUGA | |
| | | | | A | | A | |
| | | | | Modified: | | Modified: | |
| | | | | mCmAfUmGfGmAfG | | fUfCmUfGmCfGm | |
| | | | | mGfAmAfCmAfCmA | | AfUmGfUmGfUm | |
| | | | | fUmCfGmCfAmGfA | | UfCmCfUmCfCmA | |
| | | | | | | fUmG*fA*mA | |
| 20 | 1911 | TCCGCAGCCT | 181 | Unmodified: | 206 | Unmodified: | 231 |
| | | GGATGATTC | | GUUCCGCAGC | | GAAUCAUCCAG | |
| | | | | CUGGAUGAUU | | GCUGCGGAACC | |
| | | | | C | | G | |
| | | | | Modified: | | Modified: | |
| | | | | mGmUfUmCfCmGfC | | fGfAmAfUmCfAm | |
| | | | | mAfGmCfCmUfGmG | | UfCmCfAmGfGmC | |
| | | | | fAmUfGmAfUmUfC | | fUmGfCmGfGmAf | |
| | | | | | | AmC*fC*mG | |
| 21 | 2058 | TGTCTGCGCG | 182 | Unmodified: | 207 | Unmodified: | 232 |
| | | CCACATGGC | | UAUGUCUGCG | | GCCAUGUGGCG | |
| | | | | CGCCACAUGG | | CGCAGACAUAU | |
| | | | | C | | A | |
| | | | | Modified: | | Modified: | |
| | | | | mUmAfUmGfUmCfU | | fGfCmCfAmUfGm | |
| | | | | mGfCmGfCmGfCmC | | UfGmGfCmGfCmG | |
| | | | | fAmCfAmUfGmGfC | | fCmAfGmAfCmAf | |
| | | | | | | UmA*fU*mA | |
| 22 | 1515 | TCACTATGAT | 183 | Unmodified: | 208 | Unmodified: | 233 |
| | | GAAGAGAGC | | CUUCACUAUG | | GCUCUCUUCAU | |
| | | | | AUGAAGAGAG | | CAUAGUGAAGU | |
| | | | | C | | C | |
| | | | | Modified: | | Modified: | |
| | | | | mCmUfUmCfAmCfU | | fGfCmUfCmUfCm | |
| | | | | mAfUmGfAmUfGmA | | UfUmCfAmUfCmA | |
| | | | | fAmGfAmGfAmGfC | | fUmAfGmUfGmAf | |
| | | | | | | AmG*fU*mC | |
| 23 | 1083 | GGCTGAATGT | 184 | Unmodified: | 209 | Unmodified: | 234 |
| | | GAAGAAGTT | | UGGGCUGAA | | AACUUCUUCAC | |
| | | | | UGUGAAGAAG | | AUUCAGCCCAU | |
| | | | | UU | | U | |
| | | | | Modified: | | Modified: | |
| | | | | mUmGfGmGfCmUfG | | fAfAmCfUmUfCm | |
| | | | | mAfAmUfGmUfGmA | | UfUmCfAmCfAmU | |
| | | | | fAmGfAmAfGmUfU | | fUmCfAmGfCmCf | |
| | | | | | | CmA*fU*mU | |
| 24 | 513 | TGGATTCCAT | 185 | Unmodified: | 210 | Unmodified: | 235 |
| | | GAACAGCAA | | ACUGGAUUCC | | UUGCUGUUCAU | |
| | | | | AUGAACAGCA | | GGAAUCCAGUG | |
| | | | | A | | U | |
| | | | | Modified: | | Modified: | |
| | | | | mAmCfUmGfGmAfU | | fUfUmGfCmUfGm | |
| | | | | mUfCmCfAmUfGmA | | UfUmCfAmUfGmG | |
| | | | | fAmCfAmGfCmAfA | | fAmAfUmCfCmAf | |
| | | | | | | GmU*fG*mU | |
| 25 | 900 | TCTACAACAA | 186 | Unmodified: | 211 | Unmodified: | 236 |
| | | CCTGGAGAA | | CUUCUACAAC | | UUCUCCAGGUU | |
| | | | | AACCUGGAGA | | GUUGUAGAAGU | |
| | | | | A | | C | |
| | | | | Modified: | | Modified: | |
| | | | | mCmUfUmCfUmAfC | | fUfUmCfUmCfCm | |
| | | | | mAfAmCfAmAfCmC | | AfGmGfUmUfGm | |
| | | | | fUmGfGmAfGmAfA | | UfUmGfUmAfGm | |
| | | | | | | AfAmG*fU*mC | |

* The target sequence shown contains Ts. Binding of the oligonucleotides to DNA and/or RNA is contemplated.
“m” indicates a 2′-O-methyl (2′-O-Me) modified nucleoside; “f” indicates a 2′-fluoro (2′-F) modified nucleoside; “*” indicates phosphorothioate internucleoside linkage; and the absence of “*” between two nucleosides indicate phosphodiester internucleoside linkage.

[0264] In some embodiments, the GYS1-targeting oligonucleotide comprises an antisense strand that is 18-25 nucleosides (e.g., 18, 19, 20, 21, 22, 23, 24, or 25 nucleosides) in length and comprises a region of complementarity to a target sequence as set forth in any one of SEQ ID NOs: 162-186, wherein the region of complementarity is at least 16 nucleotides (e.g., 16, 17, 18, or 19 nucleotides) in length. In some embodiments, the antisense strand is 21 nucleotides in length and comprises a region of complementarity to a target sequence as set forth in any one of SEQ ID NOs: 162-186, wherein the region of complementarity is 19 nucleotides in length. In some embodiments, the region of complementarity is fully complementarity with all or a portion of its target sequence. In some embodiments, the region of complementarity includes 1, 2, 3 or more mismatches.

[0265] In some embodiments, the GYS1-targeting oligonucleotide comprises an antisense strand that comprises at least 15 consecutive nucleosides of (e.g., at least 15, at least 16, at least 17, at least 18, at least 19, or at least 20) the nucleotide sequence of any one of SEQ ID NOs: 212-236. In some embodiments, the GYS1-targeting oligonucleotide further comprises a sense strand that comprises at least 15 consecutive nucleosides of (e.g., at least 15, at least 16, at least 17, at least 18, at least 19, or at least 20) the nucleotide sequence of any one of SEQ ID NOs: 187-211.

[0266] In some embodiments, the GYS1-targeting oligonucleotide comprises an antisense strand that comprises the nucleotide sequence of any one of SEQ ID NOs: 212-236. In some embodiments, the GYS1-targeting oligonucleotide further comprises a sense strand that comprises the nucleotide sequence of any one of SEQ ID NOs: 187-211.

[0267] In some embodiments, the GYS1-targeting oligonucleotide is a double stranded oligonucleotide (e.g., an siRNA) comprising an antisense strand that comprises the nucleotide sequence of any one of SEQ ID NOs: 212-236 and a sense strand that hybridizes to the antisense strand and comprises the nucleotide sequence of any one of SEQ ID NOs: 187-211, wherein the antisense strand and/or (e.g., and) the sense strand comprises one or more modified nucleosides (e.g., 2′-modified nucleosides). In some embodiment, the one or more modified nucleosides are selected from 2′-O-Me and 2′-F modified nucleosides.

[0268] In some embodiments, the GYS1-targeting oligonucleotide is a double stranded oligonucleotide (e.g., an siRNA) comprising an antisense strand that comprises the nucleotide sequence of any one of SEQ ID NOs: 212-236 and a sense strand that hybridizes to the antisense strand and comprises the nucleotide sequence of any one of SEQ ID NOs: 187-211, wherein the each nucleoside in the antisense strand and/or (e.g., and) each nucleoside in the sense strand is a 2′-modified nucleoside selected from 2′-O-Me and 2′-F modified nucleosides.

[0269] In some embodiments, the GYS1-targeting oligonucleotide is a double stranded oligonucleotide (e.g., an siRNA) comprising an antisense strand that comprises the nucleotide sequence of any one of SEQ ID NOs: 212-236 and a sense strand that hybridizes to the antisense strand and comprises the nucleotide sequence of any one of SEQ ID NOs: 187-211, wherein the each nucleoside in the antisense strand and each nucleoside in the sense strand is a 2′-modified nucleoside selected from 2′-O-Me and 2′-F modified nucleosides, and wherein the antisense strand and/or (e.g., and) the sense strand each comprises one or more phosphorothioate internucleoside linkages. In some embodiments, the sense strand does not comprise any phosphorothioate internucleoside linkages (all the internucleoside linkages in the sense strand are phosphodiester internucleoside linkages), and the antisense strand comprises 1, 2, or 3 phosphorothioate internucleoside linkages. In some embodiments, the antisense strand comprises two phosphorothioate internucleoside linkages, optionally wherein the two internucleoside linkages at the 3′ end of the antisense strand are phosphorothioate internucleoside linkages and the rest of the internucleoside linkages in the antisense strand are phosphodiester internucleoside linkages,

[0270] In some embodiments, the antisense strand of the GYS1-targeting oligonucleotide comprises a structure of (5′ to 3′):

fNfNmNfNmNfNmNfNmNfNmNfNmNfNmNfNmNfNmNfNmN*fN*mN, wherein “mN” indicates 2′-O-methyl (2′-O-Me) modified nucleosides; “IN” indicates 2′-fluoro (2′-F) modified nucleosides; “*” indicates phosphorothioate internucleoside linkage; and the absence of “*” between two nucleosides indicate phosphodiester internucleoside linkage.

[0271] In some embodiments, the sense strand of the GYS1-targeting oligonucleotide comprises a structure of (5′ to 3′):

mNmNfNmNfNmNfNmNfNmNfNmNfNmNfNmNfNmNfNmNfN, wherein “mN” indicates 2′-O-methyl (2′-O-Mc) modified nucleosides; “IN” indicates 2′-fluoro (2′-F) modified nucleosides; and the absence of “*” between two nucleosides indicate phosphodiester internucleoside linkage.

[0272] In some embodiments, the antisense strand of the GYS1-targeting oligonucleotide is selected from the modified version of SEQ ID NOs: 212-236 listed in Table 8. In some embodiments, the sense strand of the GYS1-targeting oligonucleotide is selected from the modified version of SEQ ID NOs: 187-211 listed in Table 8. In some embodiments, the GYS1-targeting oligonucleotide is an siRNA selected from the siRNAs listed in Table 8.

[0273] In some embodiments, the GYS1-targeting oligonucleotide is selected from the siRNAs listed in Table 8. In some embodiments, any one of the GYS1-targeting oligonucleotides can be in salt form, e.g., as sodium, potassium, or magnesium salts.

[0274] In some embodiments, the 5′ or 3′ nucleoside (e.g., terminal nucleoside) of any one of the oligonucleotides described herein (e.g., the oligonucleotides listed in Table 8) is conjugated to an amine group, optionally via a spacer. In some embodiments, the spacer comprises an aliphatic moiety. In some embodiments, the spacer comprises a polyethylene glycol moiety. In some embodiments, a phosphodiester linkage is present between the spacer and the 5′ or 3′ nucleoside of the oligonucleotide. In some embodiments, the 5′ or 3′ nucleoside (e.g., terminal nucleoside) of any of the oligonucleotides described herein (e.g., the oligonucleotides listed in Table 8) is conjugated to a spacer that is a substituted or unsubstituted aliphatic, substituted or unsubstituted heteroaliphatic, substituted or unsubstituted carbocyclylene, substituted or unsubstituted heterocyclylene, substituted or unsubstituted arylene, substituted or unsubstituted heteroarylene, —O—, —N(R^{A})—, —S—, —C(═O)—, —C(—O)O—, —C(═O)NR^{A}—, —NR^{A}C(═O)—, —NR^{A}C(═O)R^{A}—, —C(═O)R^{A}—, —NR^{A}C(═O)O—, —NR^{A}C(═O)N(R^{A})—, —OC(═O)—, —OC(═O)O—, —OC(═O)N(R^{A})—, —S(O)₂NR^{A}—, —NR^{A}S(O)₂—, or a combination thereof; each R^{A} is independently hydrogen or substituted or unsubstituted alkyl. In certain embodiments, the spacer is a substituted or unsubstituted alkylene, substituted or unsubstituted heterocyclylene, substituted or unsubstituted heteroarylene, —O—, —N(R^{A})—, or —C(═O)N(R^{A})₂, or a combination thereof.

[0275] In some embodiments, the 5′ or 3′ nucleoside of any one of the oligonucleotides described herein (e.g., the oligonucleotides listed in Table 8, sense or antisense strand) is conjugated to a compound of the formula-NH₂—(CH2)ₙ—, wherein n is an integer from 1 to 12. In some embodiments, n is 6, 7, 8, 9, 10, 11, or 12. In some embodiments, a phosphodiester linkage is present between the compound of the formula NH₂—(CH₂)ₙ— and the 5′ or 3′ nucleoside of the oligonucleotide (e.g., the oligonucleotides listed in Table 8, sense or antisense strand). In some embodiments, a compound of the formula NH₂—(CH₂)₆— is conjugated to the oligonucleotide via a reaction between 6-amino-1-hexanol (NH₂—(CH₂)₆—OH) and the 5′ phosphate of the oligonucleotide (e.g., 5′ phosphate of the sense or antisense strand).

[0276] In some embodiments, the oligonucleotide is conjugated to a targeting agent, e.g., a muscle targeting agent such as an anti-TfR1 antibody, e.g., via the amine group.

### C. Linkers

[0277] Complexes described herein generally comprise a linker that covalently links any one of the anti-TfR1 antibodies described herein to a molecular payload. A linker comprises at least one covalent bond. In some embodiments, a linker may be a single bond, e.g., a disulfide bond or disulfide bridge, that covalently links an anti-TfR1 antibody to a molecular payload. However, in some embodiments, a linker may covalently link any one of the anti-TfR1 antibodies described herein to a molecular payload through multiple covalent bonds. In some embodiments, a linker may be a cleavable linker. However, in some embodiments, a linker may be a non-cleavable linker. A linker is typically stable in vitro and in vivo, and may be stable in certain cellular environments. Additionally, typically a linker does not negatively impact the functional properties of either the anti-TfR1 antibody or the molecular payload. Examples and methods of synthesis of linkers are known in the art (see, e.g., Kline, T. et al. “Methods to Make Homogenous Antibody Drug Conjugates.” Pharmaceutical Research, 2015, 32:11, 3480-3493; Jain, N. et al. “Current ADC Linker Chemistry” Pharm Res. 2015, 32:11, 3526-3540; McCombs, J. R. and Owen, S. C. “Antibody Drug Conjugates: Design and Selection of Linker, Payload and Conjugation Chemistry” AAPS J. 2015, 17:2, 339-351).

[0278] A linker typically will contain two different reactive species that allow for attachment to both the anti-TfR1 antibody and a molecular payload. In some embodiments, the two different reactive species may be a nucleophile and/or an electrophile. In some embodiments, a linker contains two different electrophiles or nucleophiles that are specific for two different nucleophiles or electrophiles. In some embodiments, a linker is covalently linked to an anti-TfR1 antibody via conjugation to a lysine residue or a cysteine residue of the anti-TfR1 antibody. In some embodiments, a linker is covalently linked to a cysteine residue of an anti-TfR1 antibody via a maleimide-containing linker, wherein optionally the maleimide-containing linker comprises a maleimidocaproyl or maleimidomethyl cyclohexane-1-carboxylate group. In some embodiments, a linker is covalently linked to a cysteine residue of an anti-TfR1 antibody or thiol functionalized molecular payload via a 3-arylpropionitrile functional group. In some embodiments, a linker is covalently linked to a lysine residue of an anti-TfR1 antibody. In some embodiments, a linker is covalently linked to an anti-TfR1 antibody and/or (e.g., and) a molecular payload, independently, via an amide bond, a carbamate bond, a hydrazide, a triazole, a thioether, and/or a disulfide bond.

i. Cleavable Linkers

[0279] A cleavable linker may be a protease-sensitive linker, a pH-sensitive linker, or a glutathione-sensitive linker. These linkers are typically cleavable only intracellularly and are preferably stable in extracellular environments, e.g., extracellular to a muscle cell.

[0280] Protease-sensitive linkers are cleavable by protease enzymatic activity. These linkers typically comprise peptide sequences and may be 2-10 amino acids, about 2-5 amino acids, about 5-10 amino acids, about 10 amino acids, about 5 amino acids, about 3 amino acids, or about 2 amino acids in length. In some embodiments, a peptide sequence may comprise naturally occurring amino acids, e.g., cysteine, alanine, or non-naturally occurring or modified amino acids. Non-naturally occurring amino acids include β-amino acids, homo-amino acids, proline derivatives, 3-substituted alanine derivatives, linear core amino acids, N-methyl amino acids, and others known in the art. In some embodiments, a protease-sensitive linker comprises a valine-citrulline or alanine-citrulline sequence. In some embodiments, a protease-sensitive linker can be cleaved by a lysosomal protease, e.g., cathepsin B, and/or (e.g., and) an endosomal protease.

[0281] A pH-sensitive linker is a covalent linkage that readily degrades in high or low pH environments. In some embodiments, a pH-sensitive linker may be cleaved at a pH in a range of 4 to 6. In some embodiments, a pH-sensitive linker comprises a hydrazone or cyclic acetal. In some embodiments, a pH-sensitive linker is cleaved within an endosome or a lysosome.

[0282] In some embodiments, a glutathione-sensitive linker comprises a disulfide moiety. In some embodiments, a glutathione-sensitive linker is cleaved by a disulfide exchange reaction with a glutathione species inside a cell. In some embodiments, the disulfide moiety further comprises at least one amino acid, e.g., a cysteine residue.

[0283] In some embodiments, a linker comprises a valine-citrulline sequence (e.g., as described in U.S. Pat. No. 6,214,345, incorporated herein by reference). In some embodiments, before conjugation, a linker comprises a structure of:

[chemical structure]

[0284] In some embodiments, after conjugation, a linker comprises a structure of:

[chemical structure]

[0285] In some embodiments, before conjugation, a linker comprises a structure of:

[chemical structure]

wherein n is any number from 0-10. In some embodiments, n is 3.

[0286] In some embodiments, a linker comprises a structure of:

[chemical structure]

wherein n is any number from 0-10, wherein m is any number from 0-10. In some embodiments, n is 3 and/or (e.g., and) m is 4.

[0287] In some embodiments, a linker comprises a structure of:

[chemical structure]

wherein n is any number from 0-10, wherein m is any number from 0-10. In some embodiments, n is 3 and/or (e.g., and) m is 4.
ii. Non-cleavable Linkers

[0288] In some embodiments, non-cleavable linkers may be used. Generally, a non-cleavable linker cannot be readily degraded in a cellular or physiological environment. In some embodiments, a non-cleavable linker comprises an optionally substituted alkyl group, wherein the substitutions may include halogens, hydroxyl groups, oxygen species, and other common substitutions. In some embodiments, a linker may comprise an optionally substituted alkyl, an optionally substituted alkylene, an optionally substituted arylene, a heteroarylene, a peptide sequence comprising at least one non-natural amino acid, a truncated glycan, a sugar or sugars that cannot be enzymatically degraded, an azide, an alkyne-azide, a peptide sequence comprising a LPXT sequence, a thioether, a biotin, a biphenyl, repeating units of polyethylene glycol or equivalent compounds, acid esters, acid amides, sulfamides, and/or an alkoxy-amine linker. In some embodiments, sortase-mediated ligation can be utilized to covalently link an anti-TfR1 antibody comprising a LPXT sequence to a molecular payload comprising a (G), sequence (see, e.g., Proft T. Sortase-mediated protein ligation: an emerging biotechnology tool for protein modification and immobilization. Biotechnol Lett. 2010, 32(1):1-10).

[0289] In some embodiments, a linker may comprise a substituted alkylene, an optionally substituted alkenylene, an optionally substituted alkynylene, an optionally substituted cycloalkylene, an optionally substituted cycloalkenylene, an optionally substituted arylene, an optionally substituted heteroarylene further comprising at least one heteroatom selected from N. O, and S; an optionally substituted heterocyclylene further comprising at least one heteroatom selected from N, O, and S, an imino, an optionally substituted nitrogen species, an optionally substituted oxygen species O, an optionally substituted sulfur species, or a poly(alkylene oxide), e.g. polyethylene oxide or polypropylene oxide. In some embodiments, a linker may be a non-cleavable N-gamma-malcimidobutyryl-oxysuccinimide ester (GMBS) linker.

iii. Linker Conjugation

[0290] In some embodiments, a linker is covalently linked to an anti-TfR1 antibody and/or (e.g., and) molecular payload via a phosphate, thioether, ether, carbon-carbon, carbamate, or amide bond. In some embodiments, a linker is covalently linked to an oligonucleotide through a phosphate or phosphorothioate group, e.g., a terminal phosphate of an oligonucleotide backbone. In some embodiments, a linker is covalently linked to an anti-TfR1 antibody, through a lysine or cysteine residue present on the anti-TfR1 antibody.

[0291] In some embodiments, a linker, or a portion thereof is covalently linked to an anti-TfR1 antibody and/or (e.g., and) molecular payload by a cycloaddition reaction between an azide and an alkyne to form a triazole, wherein the azide or the alkyne may be located on the anti-TfR1 antibody, molecular payload, or the linker. In some embodiments, an alkyne may be a cyclic alkyne, e.g., a cyclooctyne. In some embodiments, an alkyne may be bicyclononyne (also known as bicyclo[6.1.0]nonyne or BCN) or substituted bicyclononyne. In some embodiments, a cyclooctane is as described in International Patent Application Publication WO2011136645, published on Nov. 3, 2011, entitled, “Fused Cyclooctyne Compounds And Their Use In Metal-free Click Reactions”. In some embodiments, an azide may be a sugar or carbohydrate molecule that comprises an azide. In some embodiments, an azide may be 6-azido-6-deoxygalactose or 6-azido-N-acetylgalactosamine. In some embodiments, a sugar or carbohydrate molecule that comprises an azide is as described in International Patent Application Publication WO2016170186, published on Oct. 27, 2016, entitled, “Process For The Modification Of A Glycoprotein Using A Glycosyltransferase That Is Or Is Derived From A β(1,4)-N-Acetylgalactosaminyltransferase”. In some embodiments, a cycloaddition reaction between an azide and an alkyne to form a triazole, wherein the azide or the alkyne may be located on the anti-TfR1 antibody, molecular payload, or the linker is as described in International Patent Application Publication WO2014065661, published on May 1, 2014, entitled, “Modified antibody, antibody-conjugate and process for the preparation thereof”; or International Patent Application Publication WO2016170186, published on Oct. 27, 2016, entitled, “Process For The Modification Of A Glycoprotein Using A Glycosyltransferase That Is Or Is Derived From A β(1,4)-N-Acetylgalactosaminyltransferase”.

[0292] In some embodiments, a linker comprises a spacer, e.g., a polyethylene glycol spacer or an acyl/carbomoyl sulfamide spacer, e.g., a HydraSpace™ spacer. In some embodiments, a spacer is as described in Verkade, J. M. M. et al., “A Polar Sulfamide Spacer Significantly Enhances the Manufacturability, Stability, and Therapeutic Index of Antibody-Drug Conjugates”, Antibodies, 2018, 7, 12.

[0293] In some embodiments, a linker is covalently linked to an anti-TfR1 antibody and/or (e.g., and) molecular payload by the Diels-Alder reaction between a dienophile and a diene/hetero-diene, wherein the dienophile or the diene/hetero-diene may be located on the anti-TfR1 antibody, molecular payload, or the linker. In some embodiments a linker is covalently linked to an anti-TfR1 antibody and/or (e.g., and) molecular payload by other pericyclic reactions such as an ene reaction. In some embodiments, a linker is covalently linked to an anti-TfR1 antibody and/or (e.g., and) molecular payload by an amide, thioamide, or sulfonamide bond reaction. In some embodiments, a linker is covalently linked to an anti-TfR1 antibody and/or (e.g., and) molecular payload by a condensation reaction to form an oxime, hydrazone, or semicarbazide group existing between the linker and the anti-TfR1 antibody and/or (e.g., and) molecular payload.

[0294] In some embodiments, a linker is covalently linked to an anti-TfR1 antibody and/or (e.g., and) molecular payload by a conjugate addition reaction between a nucleophile, e.g., an amine or a hydroxyl group, and an electrophile, e.g., a carboxylic acid, carbonate, or an aldehyde. In some embodiments, a nucleophile may exist on a linker and an electrophile may exist on an anti-TfR1 antibody or molecular payload prior to a reaction between a linker and an anti-TfR1 antibody or molecular payload. In some embodiments, an electrophile may exist on a linker and a nucleophile may exist on an anti-TfR1 antibody or molecular payload prior to a reaction between a linker and an anti-TfR1 antibody or molecular payload. In some embodiments, an electrophile may be an azide, pentafluorophenyl, a silicon centers, a carbonyl, a carboxylic acid, an anhydride, an isocyanate, a thioisocyanate, a succinimidyl ester, a sulfosuccinimidyl ester, a maleimide, an alkyl halide, an alkyl pseudohalide, an epoxide, an episulfide, an aziridine, an aryl, an activated phosphorus center, and/or an activated sulfur center. In some embodiments, a nucleophile may be an optionally substituted alkene, an optionally substituted alkyne, an optionally substituted aryl, an optionally substituted heterocyclyl, a hydroxyl group, an amino group, an alkylamino group, an anilido group, and/or a thiol group.

[0295] In some embodiments, a linker comprises a valine-citrulline sequence covalently linked to a reactive chemical moiety (e.g., an azide moiety or a BCN moiety for click chemistry). In some embodiments, a linker comprising a valine-citrulline sequence covalently linked to a reactive chemical moiety (e.g., an azide moiety for click chemistry) comprises a structure of:

[chemical structure]

wherein n is any number from 0-10. In some embodiments, n is 3.

[0296] In some embodiments, a linker comprising the structure of Formula (A) is covalently linked (e.g., optionally via additional chemical moieties) to a molecular payload (e.g., an oligonucleotide). In some embodiments, a linker comprising the structure of Formula (A) is covalently linked to an oligonucleotide, e.g., through a nucleophilic substitution with amine-L1-oligonucleotides forming a carbamate bond, yielding a compound comprising a structure of:

[chemical structure]

wherein n is any number from 0-10. In some embodiments, n is 3.

[0297] In some embodiments, the compound of Formula (B) is further covalently linked via a triazole to additional moieties, wherein the triazole is formed by a click reaction between the azide of Formula (A) or Formula (B) and an alkyne provided on a bicyclononyne. In some embodiments, a compound comprising a bicyclononyne comprises a structure of:

[chemical structure]

wherein m is any number from 0-10. In some embodiments, m is 4.

[0298] In some embodiments, the azide of the compound of structure (B) forms a triazole via a click reaction with the alkyne of the compound of structure (C), forming a compound comprising a structure of:

[chemical structure]

wherein n is any number from 0-10, and wherein m is any number from 0-10. In some embodiments, n is 3 and m is 4.

[0299] In some embodiments, the compound of structure (D) is further covalently linked to a lysine of the anti-TfR1 antibody, forming a complex comprising a structure of:

[chemical structure]

wherein n is any number from 0-10, wherein m is any number from 0-10. In some embodiments, n is 3 and/or (e.g., and) m is 4. It should be understood that the amide shown adjacent the anti-TfR1 antibody in Formula (E) results from a reaction with an amine of the anti-TfR1 antibody, such as a lysine epsilon amine.

[0300] In some embodiments, the compound of Formula (C) is further covalently linked to a lysine of the anti-TfR1 antibody, forming a compound comprising a structure of:

[chemical structure]

wherein m is 0-15 (e.g., 4). It should be understood that the amide shown adjacent the anti-TfR1 antibody in Formula (F) results from a reaction with an amine of the anti-TfR1 antibody, such as a lysine epsilon amine.

[0301] In some embodiments, the azide of the compound of structure (B) forms a triazole via a click reaction with the alkyne of the compound of structure (F), forming a complex comprising a structure of:

[chemical structure]

wherein n is any number from 0-10, wherein m is any number from 0-10. In some embodiments, n is 3 and/or (e.g., and) m is 4. It should be understood that the amide shown adjacent the anti-TfR1 antibody in Formula (E) results from a reaction with an amine of the anti-TfR1 antibody, such as a lysine epsilon amine.

[0302] In some embodiments, the azide of the compound of structure (A) forms a triazole via a click reaction with the alkyne of the compound of structure (F), forming a compound comprising: a structure of:

[chemical structure]

wherein n is any number from 0-10, wherein m is any number from 0-10. In some embodiments, n is 3 and/or (e.g., and) m is 4. In some embodiments, an oligonucleotide is covalently linked to a compound comprising a structure of formula (G), thereby forming a complex comprising a structure of formula (E). It should be understood that the amide shown adjacent the anti-TfR1 antibody in Formula (G) results from a reaction with an amine of the anti-TfR1 antibody, such as a lysine epsilon amine.

[0303] In some embodiments, in any one of the complexes described herein, the anti-TfR1 antibody is covalently linked via a lysine of the anti-TfR1 antibody to a molecular payload (e.g., an oligonucleotide) via a linker comprising a structure of:

[chemical structure]

wherein n is any number from 0-10, wherein m is any number from 0-10. In some embodiments, n is 3 and/or (e.g., and) m is 4.

[0304] In some embodiments, in any one of the complexes described herein, the anti-TfR1 antibody is covalently linked via a lysine of the anti-TfR1 antibody to a molecular payload (e.g., an oligonucleotide) via a linker comprising a structure of:

[chemical structure]

wherein n is any number from 0-10, wherein m is any number from 0-10. In some embodiments, n is 3 and/or (e.g., and) m is 4.

[0305] In some embodiments, in formulae (B), (D), (E), and (I), L1 is a spacer that is a substituted or unsubstituted aliphatic, substituted or unsubstituted heteroaliphatic, substituted or unsubstituted carbocyclylene, substituted or unsubstituted heterocyclylene, substituted or unsubstituted arylene, substituted or unsubstituted heteroarylene, —O—, —N(R^{A})—, —S—, —C(═O)—, —C(═O)O—, —C(═O)NR^{A}—, —NR^{A}C(═O)—, —NR^{A}C(═O)R^{A}—, —C(═O)R^{A}—, —NR^{A}C(═O)O—, —NR^{A}C(═O)N(R^{A})—, —OC(═O)—, —OC(═O)O—, —OC(═O)N(R^{A})—, —S(O)₂NR^{A}—, —NR^{A}S(O)₂—, or a combination thereof, wherein each R^{A} is independently hydrogen or substituted or unsubstituted alkyl. In some embodiments, L1 is

[chemical structure]

wherein L2 is

[chemical structure]

wherein a labels the site directly linked to the carbamate moiety of formulae (B), (D), (E), and (I); and b labels the site covalently linked (directly or via additional chemical moieties) to the oligonucleotide.

[0306] In some embodiments, L1 is:

[chemical structure]

wherein a labels the site directly linked to the carbamate moiety of formulae (B), (D), (E), and (I); and b labels the site covalently linked (directly or via additional chemical moieties) to the oligonucleotide.

[0307] In some embodiments, L1 is

[chemical structure]

[0308] In some embodiments, L1 is linked to a 5′ phosphate of the oligonucleotide. In some embodiments, L1 is linked to a 5′ phosphorothioate of the oligonucleotide. In some embodiments, L1 is linked to a 5′ phosphonoamidate of the oligonucleotide.

[0309] In some embodiments, L1 is linked to a 5′ phosphate of the oligonucleotide. In some embodiments, the linkage of L1 to a 5′ phosphate of the oligonucleotide forms a phosphodiester bond between L1 and the oligonucleotide.

[0310] In some embodiments, L1 is linked to a 3′ phosphate of the oligonucleotide. In some embodiments, the linkage of L1 to a 3′ phosphate of the oligonucleotide forms a phosphodiester bond between L1 and the oligonucleotide.

[0311] In some embodiments, L1 is optional (e.g., need not be present).

[0312] In some embodiments, any one of the complexes described herein has a structure of:

[chemical structure]

wherein n is 0-15 (e.g., 3) and m is 0-15 (e.g., 4). It should be understood that the amide shown adjacent the anti-TfR1 antibody in Formula (J) results from a reaction with an amine of the anti-TfR1 antibody, such as a lysine epsilon amine.

[0313] In some embodiments, any one of the complexes described herein has a structure of:

[chemical structure]

wherein n is 0-15 (e.g., 3) and m is 0-15 (e.g., 4).

[0314] In some embodiments, the oligonucleotide is modified to comprise an amine group at the 5′ end, the 3′ end, or internally (e.g., as an amine functionalized nucleobase), prior to linking to a compound, e.g., a compound of formula (A) or formula (G).

[0315] Although linker conjugation is described in the context of anti-TfR1 antibodies and oligonucleotide molecular payloads, it should be understood that use of such linker conjugation on other muscle-targeting agents, such as other muscle-targeting antibodies, and/or on other molecular payloads is contemplated.

### D. Examples of Antibody-Molecular Payload Complexes

[0316] Further provided herein are non-limiting examples of complexes comprising any one the anti-TfR1 antibodies described herein covalently linked to any of the molecular payloads (e.g., an oligonucleotide) described herein. In some embodiments, the anti-TfR1 antibody (e.g., any one of the anti-TfR1 antibodies provided in Tables 2-7) is covalently linked to a molecular payload (e.g., an oligonucleotide such as the oligonucleotides set forth in SEQ ID NOs: 266-11107, and listed in Table 8) via a linker. Any of the linkers described herein may be used. In some embodiments, if the molecular payload is an oligonucleotide, the linker is covalently linked to the 5′ end, the 3′ end, or internally of the sense strand or the antisense strand. In some embodiments, the linker is covalently linked to the anti-TfR1 antibody via a thiol-reactive linkage (e.g., via a cysteine in the anti-TfR1 antibody). In some embodiments, the linker is covalently linked to the antibody (e.g., an anti-TfR1 antibody described herein) via an amine group (e.g., via a lysine in the antibody). In some embodiments, the molecular payload is a GYS1-targeting oligonucleotide (e.g., a GYS1-targeting oligonucleotide set forth in any one of SEQ ID NOs: 266-11107, and listed Table 8). In some embodiments, the molecular payload is the sense strand of a GYS1-targeting siRNA. In some embodiments, the molecular payload is the antisense strand of a GYS1-targeting siRNA. In some embodiments, the molecular payload is a GYS1-targeting siRNA comprising a sense strand and an antisense strand.

[0317] An example of a structure of a complex comprising an anti-TfR1 antibody covalently linked to a molecular payload via a linker is provided below:

[chemical structure]

wherein the linker is covalently linked to the antibody via a thiol-reactive linkage (e.g., via a cysteine in the antibody). In some embodiments, the molecular payload is a GYS1-targeting oligonucleotide comprising an antisense strand comprising a region of complementarity of at least 12 (e.g., at least 12, 13, 14, 15, or 16) nucleotides to a target sequence in GYS1 mRNA (e.g., a target sequence set forth in any one of SEQ ID NOs: 266-7493 and listed in Table 8), optionally wherein the antisense strand comprises at least 16 consecutive nucleotides of any one of the antisense sequences listed in Table 8, optionally wherein the GYS1-targeting oligonucleotide further comprises a sense strand that hybridizes to the antisense strand.

[0318] Another example of a structure of a complex comprising an anti-TfR1 antibody covalently linked to a molecular payload via a linker is provided below:

[chemical structure]

wherein n is a number between 0-10, wherein m is a number between 0-10, wherein the linker is covalently linked to the antibody via an amine group (e.g., on a lysine residue), and/or (e.g., and) wherein the linker is covalently linked to the sense strand or the antisense strand (e.g., at the 5′ end, 3′ end, or internally). In some embodiments, the linker is covalently linked to the antibody via a lysine, the linker is covalently linked to the oligonucleotide at the 5′ end, n is 3, and m is 4. In some embodiments, the molecular payload is a GYS1-targeting oligonucleotide comprising an antisense strand comprising a region of complementarity of at least 12 (e.g., at least 12, 13, 14, 15, or 16) nucleotides to a target sequence in GYS1 mRNA (e.g., a target sequence set forth in any one of SEQ ID NOs: 266-7493 and listed in Table 8), optionally wherein the antisense strand comprises at least 16 consecutive nucleotides of any one of the antisense sequences listed in Table 8, optionally wherein the GYS1-targeting oligonucleotide further comprises a sense strand that hybridizes to the antisense strand. In some embodiments, L1 is any one of the spacers described herein.

[0319] It should be appreciated that antibodies can be covalently linked to molecular payloads with different stoichiometries, a property that may be referred to as a drug to antibody ratios (DAR) with the “drug” being the molecular payload. In some embodiments, one molecular payload is covalently linked to an antibody (DAR=1). In some embodiments, two molecular payloads are covalently linked to an antibody (DAR=2). In some embodiments, three molecular payloads are covalently linked to an antibody (DAR=3). In some embodiments, four molecular payloads are covalently linked to an antibody (DAR=4). In some embodiments, a mixture of different complexes, each having a different DAR, is provided. In some embodiments, an average DAR of complexes in such a mixture may be in a range of 1 to 3, 1 to 4, 1 to 5 or more. DAR may be increased by conjugating molecular payloads to different sites on an antibody and/or (e.g., and) by conjugating multimers to one or more sites on antibody. For example, a DAR of 2 may be achieved by conjugating a single molecular payload to two different sites on an antibody or by conjugating a dimer molecular payload to a single site of an antibody.

[0320] In some embodiments, the complex described herein comprises an anti-TfR1 antibody described herein (e.g., the antibodies provided in Tables 2-7) covalently linked to a molecular payload. In some embodiments, the complex described herein comprises an anti-TfR1 antibody described herein (e.g., the antibodies provided in Tables 2-7) covalently linked to molecular payload via a linker. In some embodiments, the linker is covalently linked to the antibody (e.g., an anti-TfR1 antibody described herein) via a thiol-reactive linkage (e.g., via a cysteine in the antibody). In some embodiments, the linker is covalently linked to the antibody (e.g., an anti-TfR1 antibody described herein) via an amine group (e.g., via a lysine in the antibody). In some embodiments, the molecular payload is a GYS1-targeting oligonucleotide comprising an antisense strand comprising a region of complementarity of at least 12 (e.g., at least 12, 13, 14, 15, or 16) nucleotides to a target sequence in GYS1 mRNA (e.g., a target sequence set forth in any one of SEQ ID NOs: 266-7493 and listed in Table 8), optionally wherein the antisense strand comprises at least 16 consecutive nucleotides of any one of the antisense sequences listed in Table 8, optionally wherein the GYS1-targeting oligonucleotide further comprises a sense strand that hybridizes to the antisense strand.

[0321] In some embodiments, the complex described herein comprises an anti-TfR1 antibody covalently linked to a molecular payload, wherein the anti-TfR1 antibody comprises a CDR-H1, a CDR-H2, a CDR-H3, a CDR-L1, a CDR-L2, and a CDR-L3 of any one of the antibodies listed in Table 2. In some embodiments, the molecular payload is a GYS1-targeting oligonucleotide comprising an antisense strand comprising a region of complementarity of at least 12 (e.g., at least 12, 13, 14, 15, or 16) nucleotides to a target sequence in GYS1 mRNA (e.g., a target sequence set forth in any one of SEQ ID NOs: 266-7493 and listed in Table 8), optionally wherein the antisense strand comprises at least 16 consecutive nucleotides of any one of the antisense sequences listed in Table 8, optionally wherein the GYS1-targeting oligonucleotide further comprises a sense strand that hybridizes to the antisense strand.

[0322] In some embodiments, the complex described herein comprises an anti-TfR1 antibody covalently linked to a molecular payload, wherein the anti-TfR1 antibody comprises a VH comprising the amino acid sequence of SEQ ID NO: 69, SEQ ID NO: 71, or SEQ ID NO: 72, and a VL comprising the amino acid sequence of SEQ ID NO: 70. In some embodiments, the molecular payload is a GYS1-targeting oligonucleotide comprising an antisense strand comprising a region of complementarity of at least 12 (e.g., at least 12, 13, 14, 15, or 16) nucleotides to a target sequence in GYS1 mRNA (e.g., a target sequence set forth in any one of SEQ ID NOs: 266-7493 and listed in Table 8), optionally wherein the antisense strand comprises at least 16 consecutive nucleotides of any one of the antisense sequences listed in Table 8, optionally wherein the GYS1-targeting oligonucleotide further comprises a sense strand that hybridizes to the antisense strand.

[0323] In some embodiments, the complex described herein comprises an anti-TfR1 antibody covalently linked to a molecular payload, wherein the anti-TfR1 antibody comprises a VH comprising the amino acid sequence of SEQ ID NO: 73 or SEQ ID NO: 76, and a VL comprising the amino acid sequence of SEQ ID NO: 74. In some embodiments, the molecular payload is a GYS1-targeting oligonucleotide comprising an antisense strand comprising a region of complementarity of at least 12 (e.g., at least 12, 13, 14, 15, or 16) nucleotides to a target sequence in GYS1 mRNA (e.g., a target sequence set forth in any one of SEQ ID NOs: 266-7493 and listed in Table 8), optionally wherein the antisense strand comprises at least 16 consecutive nucleotides of any one of the antisense sequences listed in Table 8, optionally wherein the GYS1-targeting oligonucleotide further comprises a sense strand that hybridizes to the antisense strand.

[0324] In some embodiments, the complex described herein comprises an anti-TfR1 antibody covalently linked to a molecular payload, wherein the anti-TfR1 antibody comprises a VH comprising the amino acid sequence of SEQ ID NO: 73 or SEQ ID NO: 76, and a VL comprising the amino acid sequence of SEQ ID NO: 75. In some embodiments, the molecular payload is a GYS1-targeting oligonucleotide comprising an antisense strand comprising a region of complementarity of at least 12 (e.g., at least 12, 13, 14, 15, or 16) nucleotides to a target sequence in GYS1 mRNA (e.g., a target sequence set forth in any one of SEQ ID NOs: 266-7493 and listed in Table 8), optionally wherein the antisense strand comprises at least 16 consecutive nucleotides of any one of the antisense sequences listed in Table 8, optionally wherein the GYS1-targeting oligonucleotide further comprises a sense strand that hybridizes to the antisense strand.

[0325] In some embodiments, the complex described herein comprises an anti-TfR1 antibody covalently linked to a molecular payload, wherein the anti-TfR1 antibody comprises a VH comprising the amino acid sequence of SEQ ID NO: 77, and a VL comprising the amino acid sequence of SEQ ID NO: 78. In some embodiments, the molecular payload is a GYS1-targeting oligonucleotide comprising an antisense strand comprising a region of complementarity of at least 12 (e.g., at least 12, 13, 14, 15, or 16) nucleotides to a target sequence in GYS1 mRNA (e.g., a target sequence set forth in any one of SEQ ID NOs: 266-7493 and listed in Table 8), optionally wherein the antisense strand comprises at least 16 consecutive nucleotides of any one of the antisense sequences listed in Table 8, optionally wherein the GYS1-targeting oligonucleotide further comprises a sense strand that hybridizes to the antisense strand.

[0326] In some embodiments, the complex described herein comprises an anti-TfR1 antibody covalently linked to a molecular payload, wherein the anti-TfR1 antibody comprises a VH comprising the amino acid sequence of SEQ ID NO: 77 or SEQ ID NO: 79, and a VL comprising the amino acid sequence of SEQ ID NO: 80. In some embodiments, the molecular payload is a GYS1-targeting oligonucleotide comprising an antisense strand comprising a region of complementarity of at least 12 (e.g., at least 12, 13, 14, 15, or 16) nucleotides to a target sequence in GYS1 mRNA (e.g., a target sequence set forth in any one of SEQ ID NOs: 266-7493 and listed in Table 8), optionally wherein the antisense strand comprises at least 16 consecutive nucleotides of any one of the antisense sequences listed in Table 8, optionally wherein the GYS1-targeting oligonucleotide further comprises a sense strand that hybridizes to the antisense strand.

[0327] In some embodiments, the complex described herein comprises an anti-TfR1 antibody covalently linked to a molecular payload, wherein the anti-TfR1 antibody comprises a VH comprising the amino acid sequence of SEQ ID NO: 154, and a VL comprising the amino acid sequence of SEQ ID NO: 155. In some embodiments, the molecular payload is a GYS1-targeting oligonucleotide (e.g., a GYS1-targeting oligonucleotide listed in Table 8).

[0328] In some embodiments, the complex described herein comprises an anti-TfR1 antibody covalently linked to a molecular payload, wherein the anti-TfR1 antibody comprises a heavy chain comprising the amino acid sequence of SEQ ID NO: 84, SEQ ID NO: 86 or SEQ ID NO: 87 and a light chain comprising the amino acid sequence of SEQ ID NO: 85. In some embodiments, the molecular payload is a GYS1-targeting oligonucleotide comprising an antisense strand comprising a region of complementarity of at least 12 (e.g., at least 12, 13, 14, 15, or 16) nucleotides to a target sequence in GYS1 mRNA (e.g., a target sequence set forth in any one of SEQ ID NOs: 266-7493 and listed in Table 8), optionally wherein the antisense strand comprises at least 16 consecutive nucleotides of any one of the antisense sequences listed in Table 8, optionally wherein the GYS1-targeting oligonucleotide further comprises a sense strand that hybridizes to the antisense strand.

[0329] In some embodiments, the complex described herein comprises an anti-TfR1 antibody covalently linked to a molecular payload, wherein the anti-TfR1 antibody comprises a heavy chain comprising the amino acid sequence of SEQ ID NO: 88 or SEQ ID NO: 91, and a light chain comprising the amino acid sequence of SEQ ID NO: 89. In some embodiments, the molecular payload is a GYS1-targeting oligonucleotide comprising an antisense strand comprising a region of complementarity of at least 12 (e.g., at least 12, 13, 14, 15, or 16) nucleotides to a target sequence in GYS1 mRNA (e.g., a target sequence set forth in any one of SEQ ID NOs: 266-7493 and listed in Table 8), optionally wherein the antisense strand comprises at least 16 consecutive nucleotides of any one of the antisense sequences listed in Table 8, optionally wherein the GYS1-targeting oligonucleotide further comprises a sense strand that hybridizes to the antisense strand.

[0330] In some embodiments, the complex described herein comprises an anti-TfR1 antibody covalently linked to a molecular payload, wherein the anti-TfR1 antibody comprises a heavy chain comprising the amino acid sequence of SEQ ID NO: 88 or SEQ ID NO: 91, and a light chain comprising the amino acid sequence of SEQ ID NO: 90. In some embodiments, the molecular payload is a GYS1-targeting oligonucleotide comprising an antisense strand comprising a region of complementarity of at least 12 (e.g., at least 12, 13, 14, 15, or 16) nucleotides to a target sequence in GYS1 mRNA (e.g., a target sequence set forth in any one of SEQ ID NOs: 266-7493 and listed in Table 8), optionally wherein the antisense strand comprises at least 16 consecutive nucleotides of any one of the antisense sequences listed in Table 8, optionally wherein the GYS1-targeting oligonucleotide further comprises a sense strand that hybridizes to the antisense strand.

[0331] In some embodiments, the complex described herein comprises an anti-TfR1 antibody covalently linked to a molecular payload, wherein the anti-TfR1 antibody comprises a heavy chain comprising the amino acid sequence of SEQ ID NO: 92 or SEQ ID NO: 94, and a light chain comprising the amino acid sequence of SEQ ID NO: 95. In some embodiments, the molecular payload is a GYS1-targeting oligonucleotide comprising an antisense strand comprising a region of complementarity of at least 12 (e.g., at least 12, 13, 14, 15, or 16) nucleotides to a target sequence in GYS1 mRNA (e.g., a target sequence set forth in any one of SEQ ID NOs: 266-7493 and listed in Table 8), optionally wherein the antisense strand comprises at least 16 consecutive nucleotides of any one of the antisense sequences listed in Table 8, optionally wherein the GYS1-targeting oligonucleotide further comprises a sense strand that hybridizes to the antisense strand.

[0332] In some embodiments, the complex described herein comprises an anti-TfR1 antibody covalently linked to a molecular payload, wherein the anti-TfR1 antibody comprises a heavy chain comprising the amino acid sequence of SEQ ID NO: 92, and a light chain comprising the amino acid sequence of SEQ ID NO: 93. In some embodiments, the molecular payload is a GYS1-targeting oligonucleotide comprising an antisense strand comprising a region of complementarity of at least 12 (e.g., at least 12, 13, 14, 15, or 16) nucleotides to a target sequence in GYS1 mRNA (e.g., a target sequence set forth in any one of SEQ ID NOs: 266-7493 and listed in Table 8), optionally wherein the antisense strand comprises at least 16 consecutive nucleotides of any one of the antisense sequences listed in Table 8, optionally wherein the GYS1-targeting oligonucleotide further comprises a sense strand that hybridizes to the antisense strand.

[0333] In some embodiments, the complex described herein comprises an anti-TfR1 antibody covalently linked to a molecular payload, wherein the anti-TfR1 antibody comprises a heavy chain comprising the amino acid sequence of SEQ ID NO: 156, and a light chain comprising the amino acid sequence of SEQ ID NO: 157. In some embodiments, the molecular payload is a GYS1-targeting oligonucleotide comprising an antisense strand comprising a region of complementarity of at least 12 (e.g., at least 12, 13, 14, 15, or 16) nucleotides to a target sequence in GYS1 mRNA (e.g., a target sequence set forth in any one of SEQ ID NOs: 266-7493 and listed in Table 8), optionally wherein the antisense strand comprises at least 16 consecutive nucleotides of any one of the antisense sequences listed in Table 8, optionally wherein the GYS1-targeting oligonucleotide further comprises a sense strand that hybridizes to the antisense strand.

[0334] In some embodiments, the complex described herein comprises an anti-TfR1 antibody covalently linked to a molecular payload, wherein the anti-TfR1 antibody comprises a heavy chain comprising the amino acid sequence of SEQ ID NO: 97, SEQ ID NO: 98, or SEQ ID NO: 99 and a VL comprising the amino acid sequence of SEQ ID NO: 85. In some embodiments, the molecular payload is a GYS1-targeting oligonucleotide comprising an antisense strand comprising a region of complementarity of at least 12 (e.g., at least 12, 13, 14, 15, or 16) nucleotides to a target sequence in GYS1 mRNA (e.g., a target sequence set forth in any one of SEQ ID NOs: 266-7493 and listed in Table 8), optionally wherein the antisense strand comprises at least 16 consecutive nucleotides of any one of the antisense sequences listed in Table 8, optionally wherein the GYS1-targeting oligonucleotide further comprises a sense strand that hybridizes to the antisense strand.

[0335] In some embodiments, the complex described herein comprises an anti-TfR1 antibody covalently linked to a molecular payload, wherein the anti-TfR1 antibody comprises a heavy chain comprising the amino acid sequence of SEQ ID NO: 100 or SEQ ID NO: 101 and a light chain comprising the amino acid sequence of SEQ ID NO: 89. In some embodiments, the molecular payload is a GYS1-targeting oligonucleotide comprising an antisense strand comprising a region of complementarity of at least 12 (e.g., at least 12, 13, 14, 15, or 16) nucleotides to a target sequence in GYS1 mRNA (e.g., a target sequence set forth in any one of SEQ ID NOs: 266-7493 and listed in Table 8), optionally wherein the antisense strand comprises at least 16 consecutive nucleotides of any one of the antisense sequences listed in Table 8, optionally wherein the GYS1-targeting oligonucleotide further comprises a sense strand that hybridizes to the antisense strand.

[0336] In some embodiments, the complex described herein comprises an anti-TfR1 antibody covalently linked to a molecular payload, wherein the anti-TfR1 antibody comprises a heavy chain comprising the amino acid sequence of SEQ ID NO: 100 or SEQ ID NO: 101 and a light chain comprising the amino acid sequence of SEQ ID NO: 90. In some embodiments, the molecular payload is a GYS1-targeting oligonucleotide comprising an antisense strand comprising a region of complementarity of at least 12 (e.g., at least 12, 13, 14, 15, or 16) nucleotides to a target sequence in GYS1 mRNA (e.g., a target sequence set forth in any one of SEQ ID NOs: 266-7493 and listed in Table 8), optionally wherein the antisense strand comprises at least 16 consecutive nucleotides of any one of the antisense sequences listed in Table 8, optionally wherein the GYS1-targeting oligonucleotide further comprises a sense strand that hybridizes to the antisense strand.

[0337] In some embodiments, the complex described herein comprises an anti-TfR1 antibody covalently linked to a molecular payload, wherein the anti-TfR1 antibody comprises a heavy chain comprising the amino acid sequence of SEQ ID NO: 102 and a light chain comprising the amino acid sequence of SEQ ID NO: 93. In some embodiments, the molecular payload is a GYS1-targeting oligonucleotide comprising an antisense strand comprising a region of complementarity of at least 12 (e.g., at least 12, 13, 14, 15, or 16) nucleotides to a target sequence in GYS1 mRNA (e.g., a target sequence set forth in any one of SEQ ID NOs: 266-7493 and listed in Table 8), optionally wherein the antisense strand comprises at least 16 consecutive nucleotides of any one of the antisense sequences listed in Table 8, optionally wherein the GYS1-targeting oligonucleotide further comprises a sense strand that hybridizes to the antisense strand.

[0338] In some embodiments, the complex described herein comprises an anti-TfR1 antibody covalently linked to a molecular payload, wherein the anti-TfR1 antibody comprises a heavy chain comprising the amino acid sequence of SEQ ID NO: 102 or SEQ ID NO: 103 and a light chain comprising the amino acid sequence of SEQ ID NO: 95 In some embodiments, the molecular payload is a GYS1-targeting oligonucleotide comprising an antisense strand comprising a region of complementarity of at least 12 (e.g., at least 12, 13, 14, 15, or 16) nucleotides to a target sequence in GYS1 mRNA (e.g., a target sequence set forth in any one of SEQ ID NOs: 266-7493 and listed in Table 8), optionally wherein the antisense strand comprises at least 16 consecutive nucleotides of any one of the antisense sequences listed in Table 8, optionally wherein the GYS1-targeting oligonucleotide further comprises a sense strand that hybridizes to the antisense strand.

[0339] In some embodiments, the complex described herein comprises an anti-TfR1 antibody covalently linked to a molecular payload, wherein the anti-TfR1 antibody comprises a heavy chain comprising the amino acid sequence of SEQ ID NO: 158 or SEQ ID NO: 159 and a light chain comprising the amino acid sequence of SEQ ID NO: 157. In some embodiments, the molecular payload is a GYS1-targeting oligonucleotide comprising an antisense strand comprising a region of complementarity of at least 12 (e.g., at least 12, 13, 14, 15, or 16) nucleotides to a target sequence in GYS1 mRNA (e.g., a target sequence set forth in any one of SEQ ID NOs: 266-7493 and listed in Table 8), optionally wherein the antisense strand comprises at least 16 consecutive nucleotides of any one of the antisense sequences listed in Table 8, optionally wherein the GYS1-targeting oligonucleotide further comprises a sense strand that hybridizes to the antisense strand.

[0340] In some embodiments, the complex described herein comprises an anti-TfR1 antibody covalently linked to the 3′ or 5′ end of a GYS1-targeting oligonucleotide (e.g., the sense or antisense strand of a GYS1-targeting oligonucleotide listed in Table 8) via a lysine in the anti-TfR1 antibody, wherein the anti-TfR1 antibody comprises a CDR-H1, a CDR-H2, a CDR-H3, a CDR-L1, a CDR-L2, and a CDR-L3 of any one of the antibodies listed in Table 2, wherein the complex has a structure of:

[chemical structure]

wherein n is 3 and m is 4, and wherein L1 is any one of the spacers described herein.

[0341] In some embodiments, the complex described herein comprises an anti-TfR1 antibody covalently linked to the 3′ or 5′ end of a GYS1-targeting oligonucleotide (e.g., the sense or antisense strand of a GYS1-targeting oligonucleotide listed in Table 8) via a lysine in the anti-TfR1 antibody, wherein the anti-TfR1 antibody comprises a VH and VL of any one of the antibodies listed in Table 3, wherein the complex has a structure of:

[chemical structure]

wherein n is 3 and m is 4, and wherein L1 is any one of the spacers described herein.

[0342] In some embodiments, the complex described herein comprises an anti-TfR1 antibody covalently linked to the 3′ or 5′ end of a GYS1-targeting oligonucleotide (e.g., the sense or antisense strand of a GYS1-targeting oligonucleotide listed in Table 8) via a lysine in the anti-TfR1 antibody, wherein the anti-TfR1 antibody comprises a heavy chain and light chain of any one of the antibodies listed in Table 4, wherein the complex has a structure of:

[chemical structure]

wherein n is 3 and m is 4, and wherein L1 is any one of the spacers described herein.

[0343] In some embodiments, the complex described herein comprises an anti-TfR1 antibody covalently linked to the 3′ or 5′ end of a GYS1-targeting oligonucleotide (e.g., the sense or antisense strand of a GYS1-targeting oligonucleotide listed in Table 8) via a lysine in the anti-TfR1 Fab, wherein the anti-TfR1 Fab comprises a heavy chain and light chain of any one of the antibodies listed in Table 5, wherein the complex has a structure of:

[chemical structure]

wherein n is 3 and m is 4, and wherein L1 is any one of the spacers described herein.

[0344] In some embodiments, L1 is linked to a 5′ phosphate of the oligonucleotide. In some embodiments, L1 is linked to a 5′ phosphorothioate of the oligonucleotide. In some embodiments, L1 is linked to a 5′ phosphonoamidate of the oligonucleotide.

[0345] In some embodiments, L1 is linked to a 5′ phosphate of the oligonucleotide. In some embodiments, the linkage of L1 to a 5′ phosphate of the oligonucleotide forms a phosphodiester bond between L1 and the oligonucleotide.

[0346] In some embodiments, L1 is linked to a 3′ phosphate of the oligonucleotide. In some embodiments, the linkage of L1 to a 3′ phosphate of the oligonucleotide forms a phosphodiester bond between L1 and the oligonucleotide.

[0347] In some embodiments, L1 is optional (e.g., need not be present).

### III. Formulations

[0348] Complexes provided herein may be formulated in any suitable manner. Generally, complexes provided herein are formulated in a manner suitable for pharmaceutical use. For example, complexes can be delivered to a subject using a formulation that minimizes degradation, facilitates delivery and/or (e.g., and) uptake, or provides another beneficial property to the complexes in the formulation. In some embodiments, provided herein are compositions comprising complexes and pharmaceutically acceptable carriers. Such compositions can be suitably formulated such that when administered to a subject, either into the immediate environment of a target cell or systemically, a sufficient amount of the complexes enter target muscle cells. In some embodiments, complexes are formulated in buffer solutions such as phosphate-buffered saline solutions, liposomes, micellar structures, and capsids.

[0349] It should be appreciated that, in some embodiments, compositions may include separately one or more components of complexes provided herein (e.g., muscle-targeting agents, linkers, molecular payloads, or precursor molecules of any one of them).

[0350] In some embodiments, complexes are formulated in water or in an aqueous solution (e.g., water with pH adjustments). In some embodiments, complexes are formulated in basic buffered aqueous solutions (e.g., PBS). In some embodiments, formulations as disclosed herein comprise an excipient. In some embodiments, an excipient confers to a composition improved stability, improved absorption, improved solubility and/or (e.g., and) therapeutic enhancement of the active ingredient. In some embodiments, an excipient is a buffering agent (e.g., sodium citrate, sodium phosphate, a tris base, or sodium hydroxide) or a vehicle (e.g., a buffered solution, petrolatum, dimethyl sulfoxide, or mineral oil).

[0351] In some embodiments, a complex or component thereof (e.g., oligonucleotide or antibody) is lyophilized for extending its shelf-life and then made into a solution before use (e.g., administration to a subject). Accordingly, an excipient in a composition comprising a complex, or component thereof, described herein may be a lyoprotectant (e.g., mannitol, lactose, polyethylene glycol, or polyvinyl pyrolidone), or a collapse temperature modifier (e.g., dextran, ficoll, or gelatin).

[0352] In some embodiments, a pharmaceutical composition is formulated to be compatible with its intended route of administration. Examples of routes of administration include parenteral, e.g., intravenous, intradermal, subcutaneous administration. Typically, the route of administration is intravenous or subcutaneous.

[0353] Pharmaceutical compositions suitable for injectable use include sterile aqueous solutions (where water soluble) or dispersions and sterile powders for the extemporaneous preparation of sterile injectable solutions or dispersions. The carrier can be a solvent or dispersion medium containing, for example, water, ethanol, polyol (for example, glycerol, propylene glycol, and liquid polyethylene glycol, and the like), and suitable mixtures thereof. In some embodiments, formulations include isotonic agents, for example, sugars, polyalcohols such as mannitol, sorbitol, and sodium chloride in the composition. Sterile injectable solutions can be prepared by incorporating the complexes in a required amount in a selected solvent with one or a combination of ingredients enumerated above, as required, followed by filtered sterilization.

[0354] In some embodiments, a composition may contain at least about 0.1% of the complex, or component thereof, or more, although the percentage of the active ingredient(s) may be between about 1% and about 80% or more of the weight or volume of the total composition. Factors such as solubility, bioavailability, biological half-life, route of administration, product shelf life, as well as other pharmacological considerations will be contemplated by one skilled in the art of preparing such pharmaceutical formulations, and as such, a variety of dosages and treatment regimens may be desirable.

### IV. Methods of Use/Treatment

[0355] Complexes comprising a muscle-targeting agent covalently linked to a molecular payload as described herein are effective in treating Pompe disease (PD). In some embodiments, PD is associated with a GAA allele comprising mutations. In some embodiments, the mutations result in decreased enzyme activity, leading to toxic build-up of glycogen in lysosomes.

[0356] In some embodiments, a subject may be a human subject, a non-human primate subject, a rodent subject, or any suitable mammalian subject. In some embodiments, a subject may have PD. In some embodiments, a subject has a toxic build-up of glycogen in lysosomes. In some embodiments, a subject having Pompe disease is currently receiving or has previously received enzyme replacement therapy.

[0357] An aspect of the disclosure includes methods involving administering to a subject an effective amount of a complex as described herein. In some embodiments, an effective amount of a pharmaceutical composition that comprises a complex comprising a muscle-targeting agent covalently linked to a molecular payload can be administered to a subject in need of treatment. In some embodiments, a pharmaceutical composition comprising a complex as described herein may be administered by a suitable route, which may include intravenous administration, e.g., as a bolus or by continuous infusion over a period of time. In some embodiments, intravenous administration may be performed by intramuscular, intraperitoneal, intracerebrospinal, subcutaneous, intra-articular, intrasynovial, or intrathecal routes. In some embodiments, a pharmaceutical composition may be in solid form, aqueous form, or a liquid form. In some embodiments, an aqueous or liquid form may be nebulized or lyophilized. In some embodiments, a nebulized or lyophilized form may be reconstituted with an aqueous or liquid solution.

[0358] Compositions for intravenous administration may contain various carriers such as vegetable oils, dimethylactamide, dimethyformamide, ethyl lactate, ethyl carbonate, isopropyl myristate, ethanol, and polyols (glycerol, propylene glycol, liquid polyethylene glycol, and the like). For intravenous injection, water soluble antibodies can be administered by the drip method, whereby a pharmaceutical formulation containing the antibody and a physiologically acceptable excipients is infused. Physiologically acceptable excipients may include, for example, 5% dextrose, 0.9% saline, Ringer's solution or other suitable excipients. Intramuscular preparations, e.g., a sterile formulation of a suitable soluble salt form of the antibody, can be dissolved and administered in a pharmaceutical excipient such as Water-for-Injection, 0.9% saline, or 5% glucose solution.

[0359] In some embodiments, a pharmaceutical composition that comprises a complex comprising a muscle-targeting agent covalently linked to a molecular payload is administered via site-specific or local delivery techniques. Examples of these techniques include implantable depot sources of the complex, local delivery catheters, site specific carriers, direct injection, or direct application.

[0360] In some embodiments, a pharmaceutical composition that comprises a complex comprising a muscle-targeting agent covalently linked to a molecular payload is administered at an effective concentration that confers therapeutic effect on a subject. Effective amounts vary, as recognized by those skilled in the art, depending on the severity of the disease, unique characteristics of the subject being treated, e.g., age, physical conditions, health, or weight, the duration of the treatment, the nature of any concurrent therapies, the route of administration and related factors. These related factors are known to those in the art and may be addressed with no more than routine experimentation. In some embodiments, an effective concentration is the maximum dose that is considered to be safe for the patient. In some embodiments, an effective concentration will be the lowest possible concentration that provides maximum efficacy.

[0361] Empirical considerations, e.g., the half-life of the complex in a subject, generally will contribute to determination of the concentration of pharmaceutical composition that is used for treatment. The frequency of administration may be empirically determined and adjusted to maximize the efficacy of the treatment.

[0362] Generally, for administration of any of the complexes described herein, an initial candidate dosage may be about 1 to 100 mg/kg, or more, depending on the factors described above, e.g., safety or efficacy. In some embodiments, a treatment will be administered once. In some embodiments, a treatment will be administered daily, biweekly, weekly, bimonthly, monthly, or at any time interval that provide maximum efficacy while minimizing safety risks to the subject. Generally, the efficacy and the treatment and safety risks may be monitored throughout the course of treatment.

[0363] The efficacy of treatment may be assessed using any suitable methods. In some embodiments, the efficacy of treatment may be assessed by evaluation of observation of symptoms associated with PD including toxic build-up of glycogen in the lysosomes, muscle weakness, reduced muscle tone (hypotonia), cardiac enlargement, and difficulty breathing.

[0364] In some embodiments, a pharmaceutical composition that comprises a complex comprising a muscle-targeting agent covalently linked to a molecular payload described herein is administered to a subject at an effective concentration sufficient to inhibit activity or expression of a target gene by at least 10%, at least 20%, at least 30%, at least 40%, at least 50%, at least 60%, at least 70%, at least 80%, at least 90% or at least 95% relative to a control, e.g. baseline level of gene expression prior to treatment.

[0365] In some embodiments, a single dose or administration of a pharmaceutical composition that comprises a complex comprising a muscle-targeting agent covalently linked to a molecular payload described herein to a subject is sufficient to inhibit activity or expression of a target gene for at least 1-5, 1-10, 5-15, 10-20, 15-30, 20-40, 25-50, or more days. In some embodiments, a single dose or administration of a pharmaceutical composition that comprises a complex comprising a muscle-targeting agent covalently linked to a molecular payload described herein to a subject is sufficient to inhibit activity or expression of a target gene for at least 1, 2, 3, 4, 5, 6, 7, 8, 9, 10, 11, 12, 15, 20, or 24 weeks. In some embodiments, a single dose or administration of a pharmaceutical composition that comprises a complex comprising a muscle-targeting agent covalently linked to a molecular payload described herein to a subject is sufficient to inhibit activity or expression of a target gene for at least 1-5, 1-10, 2-5, 2-10, 4-8, 4-12, 5-10, 5-12, 5-15, 8-12, 8-15, 10-12, 10-15, 10-20, 12-15, 12-20, 15-20, or 15-25 weeks. In some embodiments, a single dose or administration of a pharmaceutical composition that comprises a complex comprising a muscle-targeting agent covalently linked to a molecular payload described herein to a subject is sufficient to inhibit activity or expression of a target gene for at least 1, 2, 3, 4, 5, or 6 months.

[0366] In some embodiments, a pharmaceutical composition may comprise more than one complex comprising a muscle-targeting agent covalently linked to a molecular payload. In some embodiments, a pharmaceutical composition may further comprise any other suitable therapeutic agent for treatment of a subject, e.g., a human subject having PD. In some embodiments, the other therapeutic agents may enhance or supplement the effectiveness of the complexes described herein. In some embodiments, the other therapeutic agents may function to treat a different symptom or disease than the complexes described herein.

### EXAMPLES

### Example 1: Targeting Gene Expression with Transfected Antisense Oligonucleotides

[0367] An siRNA that targets hypoxanthine phosphoribosyltransferase (HPRT) was tested in vitro for its ability to reduce expression levels of HPRT in an immortalized cell line. Briefly, Hepa 1-6 cells were transfected with either a control siRNA (siCTRL; 100 nM) or the siRNA that targets HPRT (siHPRT; 100 nM), formulated with Lipofectamine 2000. HPRT expression levels were evaluated 48 hours following transfection. A control experiment was also performed in which vehicle (phosphate-buffered saline) was delivered to Hepa 1-6 cells in culture and the cells were maintained for 48 hours. As shown in FIG. 1, it was found that the HPRT siRNA reduced HPRT expression levels by ˜90% compared with controls.

TABLE 9
Sequences of siHPRT and siCTRL

| | Sequence | SEQ ID NO: |
|---|---|---|
| siHPRT sense strand | 5′-UcCuAuGaCuGuAgAuUuUaU-(CH₂)₆NH₂-3′ | 237 |
| siHPRT antisense strand | 5′-aUaAaAuCuAcAgUcAuAgGasAsu-3′ | 238 |
| siCTRL sense strand | 5′-UgUaAuAaCcAuAuCuAcCuU-(CH₂)₆NH₂-3′ | 239 |
| siCTRL antisense strand | 5′-aAgGuAgAuAuGgUuAuUaCasAsa-3′ | 240 |

*Lower case-2′-O-Me ribose; Capital letter-2′Fluoro ribose; p-phosphate linkage; s-phosphorothioate linkage

### Example 2: Targeting HPRT with a Muscle-Targeting Complex

[0368] A muscle-targeting complex was generated comprising the HPRT siRNA used in Example 1 (siHPRT) covalently linked, via a non-cleavable N-gamma-malcimidobutyryl-oxysuccinimide ester (GMBS) linker, to DTX-A-002 (RI7 217 anti-TfR1 Fab).

[0369] Briefly, the GMBS linker was dissolved in dry DMSO and coupled to the 3′ end of the sense strand of siHPRT through amide bond formation under aqueous conditions. Completion of the reaction was verified by Kaiser test. Excess linker and organic solvents were removed by gel permeation chromatography. The purified, maleimide functionalized sense strand of siHPRT was then coupled to DTX-A-002 antibody using a Michael addition reaction.

[0370] The product of the antibody coupling reaction was then subjected to hydrophobic interaction chromatography (HIC-HPLC). antiTfR1-siHPRT complexes comprising one or two siHPRT molecules covalently linked to DTX-A-002 antibody were purified. Densitometry confirmed that the purified sample of complexes had an average siHPRT to antibody ratio of 1.46. SDS-PAGE analysis demonstrated that >90% of the purified sample of complexes comprised DTX-A-002 covalently linked to either one or two siHPRT molecules.

[0371] Using the same methods as described above, a control IgG2a-siHPRT complex was generated comprising the HPRT siRNA used in Example 1 (siHPRT) covalently linked via the GMBS linker to an IgG2a (Fab) antibody (DTX-A-003). Densitometry confirmed that DTX-C-001 (the control IgG2a-siHPRT complex) had an average siHPRT to antibody ratio of 1.46 and SDS-PAGE demonstrated that >90% of the purified sample of control complexes comprised DTX-A-003 covalently linked to either one or two siHPRT molecules.

[0372] The antiTfR-siHPRT complex was then tested for cellular internalization and inhibition of HPRT in cellulo. Hepa 1-6 cells, which have relatively high expression levels of transferrin receptor, were incubated in the presence of vehicle (phosphate-buffered saline), IgG2a-siHPRT (100 nM), antiTfR-siCTRL (100 nM), or antiTfR-siHPRT (100 nM), for 72 hours. After the 72-hour incubation, the cells were isolated and assayed for expression levels of HPRT (FIG. 2). Cells treated with the antiTfR-siHPRT demonstrated a reduction in HPRT expression by ˜50% relative to the cells treated with the vehicle control and to those treated with the IgG2a-siHPRT complex. Meanwhile, cells treated with either of the IgG2a-siHPRT or antiTfR-siCTRL had HPRT expression levels comparable to the vehicle control (no reduction in HPRT expression). These data indicate that the anti-transferrin receptor antibody of the antiTfR-siHPRT enabled cellular internalization of the complex, thereby allowing the siHPRT to inhibit expression of HPRT.

### Example 3: Targeting HPRT in Mouse Muscle Tissues with a Muscle-Targeting Complex

[0373] The muscle-targeting complex described in Example 2, antiTfR-siHPRT, was tested for inhibition of HPRT in mouse tissues. C57BL/6 wild-type mice were intravenously injected with a single dose of a vehicle control (phosphate-buffered saline); siHPRT (2 mg/kg of siRNA); IgG2a-siHPRT (2 mg/kg of siRNA, corresponding to 9 mg/kg antibody complex); or antiTfR-siHPRT (2 mg/kg of siRNA, corresponding to 9 mg/kg antibody complex. Each experimental condition was replicated in four individual C57BL/6 wild-type mice. Following a three-day period after injection, the mice were euthanized and segmented into isolated tissue types. Individual tissue samples were subsequently assayed for expression levels of HPRT (FIGS. 3A-3B and 4A-4E).

[0374] Mice treated with the antiTfR-siHPRT complex demonstrated a reduction in HPRT expression in gastrocnemius (31% reduction; p<0.05) and heart (30% reduction; p<0.05), relative to the mice treated with the siHPRT control (FIGS. 3A-3B). Meanwhile, mice treated with the IgG2a-siHPRT complex had HPRT expression levels comparable to the siHPRT control (little or no reduction in HPRT expression) for all assayed muscle tissue types.

[0375] Mice treated with the antiTfR-siHPRT complex demonstrated no change in HPRT expression in non-muscle tissues such as brain, liver, lung, kidney, and spleen tissues (FIGS. 4A-4E).

[0376] These data indicate that the anti-transferrin receptor 1 antibody of the antiTfR-siHPRT complex enabled cellular internalization of the complex into muscle-specific tissues in an in vivo mouse model, thereby allowing the siHPRT to inhibit expression of HPRT. These data further demonstrate that the antiTfR-oligonucleotide complexes of the current disclosure are capable of specifically targeting muscle tissues.

### Example 4: GYS1-Targeting siRNAs-Dual Dose Screen

[0377] Twenty-five siRNAs targeting GYS1 mRNA were designed and are listed in Table 8. The synthesized siRNAs contain 2′-O-methyl (2′-O-Me) and 2′-fluoro (2′F) modifications with phosphorothioate internucleoside linkages. Screening of the GYS1-targeting siRNAs was carried out by knockdown of the endogenous GYS1 mRNA in LS 174T colorectal adenocarcinoma cells. The LS 174T cells were seeded at a density of 15,000 cells per well in a 96 well plate and allowed to recover overnight. The next day, cells were transfected with GYS1-targeting siRNAs at a concentration of 20 nM or 1 nM using Lipofectamine RNAiMax in technical quadruplicate. Cells were then incubated for 72 hours, then harvested. The knockdown of GYS1 mRNA was evaluated using a branched DNA (bDNA) assay specific to GYS1. All target knockdown data was normalized to a reference bDNA assay to measure GAPDH transcript levels, and quadruplicate values were averaged to report a mean transcript level. Mean transcript levels (percent remaining transcript level after knockdown) and standard deviation for each of the quadruplicates are shown in Table 10.

TABLE 10
Activity of GYS1-targeting siRNAs in LS 174T cells

| | Remaining Mean Transcript | Remaining Mean Transcript |
|---|---|---|
| siRNA | Level (%) (treated with at | Level (%) (treated with at |
| No.* | 20 nM siRNA) | .2 nM siRNA) |
| 1 | 78.3 ± 2.4 | 61.9 ± 11.7 |
| 2 | 14.1 ± 0.6 | 65.7 ± 15.5 |
| 3 | 47.8 ± 3.3 | 98.0 ± 9.2 |
| 4 | 43.6 ± 3.4 | 92.4 ± 8.4 |
| 5 | 20.3 ± 0.9 | 76.0 ± 8.6 |
| 6 | 29.3 ± 5.5 | 47.7 ± 21.2 |
| 7 | 44.0 ± 2.7 | 79.5 ± 8.3 |
| 8 | 25.7 ± 0.3 | 48.0 ± 4.7 |
| 9 | 25.8 ± 1.3 | 64.1 ± 6.5 |
| 10 | 48.0 ± 14.0 | 83.6 ± 17.2 |
| 11 | 17.0 ± 2.7 | 49.8 ± 2.8 |
| 12 | 31.1 ± 4.7 | 94.7 ± 6.3 |
| 13 | 20.1 ± 2.4 | 67.1 ± 3.8 |
| 14 | 21.5 ± 3.0 | 77.6 ± 13.9 |
| 15 | 74.5 ± 6.4 | 86.6 ± 4.1 |
| 16 | 43.4 ± 3.1 | 75.6 ± 4.8 |
| 17 | 32.1 ± 3.9 | 58.5 ± 12.5 |
| 18 | 30.9 ± 3.3 | 47.8 ± 4.1 |
| 19 | 48.9 ± 3.9 | 68.8 ± 19.7 |
| 20 | 25.5 ± 2.3 | 35.3 ± 3.4 |
| 21 | 82.7 ± 10.6 | 117.3 ± 0.2 |
| 22 | 17.8 ± 2.2 | 69.9 ± 6.5 |
| 23 | 15.9 ± 0.9 | 54.3 ± 14.7 |
| 24 | 18.4 ± 2.2 | 75.2 ± 11.0 |
| 25 | 26.8 ± 0.9 | 68.9 ± 10.7 |

*siRNA No. corresponds to the siRNA numbers shown in Table 8. The antisense strand and the sense strand have the modifications indicated in Table 8.

### Example 5: GYS1-Targeting siRNAs-Dose Response

[0378] Five siRNAs targeting GYS1 mRNA (Table 11) were tested for their ability to knockdown FXN mRNA in a dose-response experiment in LS 174T colorectal adenocarcinoma cells. The LS 174T cells were seeded at a density of 15,000 cells per well in a 96 well plate and allowed to recover overnight. The next day, cells were transfected with GYS1-targeting siRNAs at 10 concentrations using Lipofectamine RNAiMax in technical quadruplicate. Cells were incubated for 72 hours and harvested. Dose response analysis including calculation of IC50 values for the tested siRNAs was performed and results are shown in Table 11.

TABLE 11

| siRNA No.* | IC20 (pM) | IC50 (pM) | Max Inhibition (%) |
|---|---|---|---|
| 2 | 6.63E−04 | 10.82 | 72.93 |
| 11 | 4.68 | 317.93 | 75.91 |
| 20 | 1.10E−03 | 0.30 | 74.89 |
| 22 | 145.06 | 905.70 | 68.50 |
| 23 | 1.22E−02 | 19.33 | 75.51 |

*siRNA No. corresponds to siRNA numbers shown in Table 8. Both the sense strand and antisense strand have the modifications shown in Table 8.

### Example 6. In Vivo Activity of Conjugates Containing Anti-TfR1 Fab Conjugated to DMPK-Targeting Oligonucleotide in Mice Expressing Human TfR1

[0379] Conjugates containing anti-TfR1 Fab 3M12-VH4/VK3 conjugated to a DMPK-targeting oligonucleotide were tested in a mouse model that expresses human TfR1. The anti-TfR1 Fab 3M12-VH4/VK3 was conjugated to a DMPK-targeting oligonucleotide via a cleavable linker having the structure of Formula (I). The conjugate was administered to the mice at a dose equivalent to 10 mg/kg oligonucleotide on day 0 and day 7. Mice were sacrificed on day 14 and different muscle tissues were collected and analyzed for dmpk mRNA level and oligonucleotide concentration in the tissue. The conjugate reduced mouse wild-type dmpk in Tibialis Anterior by 79% (FIG. 5A), in gastrocnemius by 76% (FIG. 5B), in the heart by 70% (FIG. 5C), and in diaphragm by 88% (FIG. 5D). Oligonucleotide distributions in Tibialis Anterior, gastrocnemius, heart, and diaphragm are shown in FIGS. 5E-5H.

[0380] These data indicate that an anti-TfR1 antibody (e.g., anti-TfR1 Fab 3M12-VH4/VK3) enabled cellular internalization of the conjugate into muscle-specific tissues in an in vivo mouse model, thereby allowing the DMPK-targeting oligonucleotide to reduce expression of DMPK. Similarly, an anti-TfR1 antibody (e.g., anti-TfR1 Fab 3M12-VH4/VK3) can enable cellular internalization of a conjugate containing the anti-TfR1 antibody conjugated to a GYS1-targeting oligonucleotide for reducing GYS1 expression.

### EQUIVALENTS AND TERMINOLOGY

[0381] The disclosure illustratively described herein suitably can be practiced in the absence of any element or elements, limitation or limitations that are not specifically disclosed herein. Thus, for example, in each instance herein any of the terms “comprising”, “consisting essentially of”, and “consisting of” may be replaced with either of the other two terms. The terms and expressions which have been employed are used as terms of description and not of limitation, and there is no intention that in the use of such terms and expressions of excluding any equivalents of the features shown and described or portions thereof, but it is recognized that various modifications are possible within the scope of the disclosure. Thus, it should be understood that although the present disclosure has been specifically disclosed by preferred embodiments, optional features, modification and variation of the concepts herein disclosed may be resorted to by those skilled in the art, and that such modifications and variations are considered to be within the scope of this disclosure.

[0382] In addition, where features or aspects of the disclosure are described in terms of Markush groups or other grouping of alternatives, those skilled in the art will recognize that the disclosure is also thereby described in terms of any individual member or subgroup of members of the Markush group or other group.

[0383] It should be appreciated that, in some embodiments, sequences presented in the sequence listing may be referred to in describing the structure of an oligonucleotide or other nucleic acid. In such embodiments, the actual oligonucleotide or other nucleic acid may have one or more alternative nucleotides or nucleosides (e.g., an RNA counterpart of a DNA nucleoside or a DNA counterpart of an RNA nucleoside) and/or (e.g., and) one or more modified nucleotides/nucleosides and/or (e.g., and) one or more modified internucleoside linkages and/or (e.g., and) one or more other modification compared with the specified sequence while retaining essentially same or similar complementary properties as the specified sequence.

[0384] The use of the terms “a” and “an” and “the” and similar referents in the context of describing the invention (especially in the context of the following claims) are to be construed to cover both the singular and the plural, unless otherwise indicated herein or clearly contradicted by context. The terms “comprising.” “having.” “including.” and “containing” are to be construed as open-ended terms (i.e., meaning “including, but not limited to,”) unless otherwise noted. Recitation of ranges of values herein are merely intended to serve as a shorthand method of referring individually to each separate value falling within the range, unless otherwise indicated herein, and each separate value is incorporated into the specification as if it were individually recited herein. All methods described herein can be performed in any suitable order unless otherwise indicated herein or otherwise clearly contradicted by context. The use of any and all examples, or exemplary language (e.g., “such as”) provided herein, is intended merely to better illuminate the invention and does not pose a limitation on the scope of the invention unless otherwise claimed. No language in the specification should be construed as indicating any non-claimed element as essential to the practice of the invention.

[0385] Embodiments of this invention are described herein. Variations of those embodiments may become apparent to those of ordinary skill in the art upon reading the foregoing description.

[0386] The inventors expect skilled artisans to employ such variations as appropriate, and the inventors intend for the invention to be practiced otherwise than as specifically described herein. Accordingly, this invention includes all modifications and equivalents of the subject matter recited in the claims appended hereto as permitted by applicable law. Moreover, any combination of the above-described elements in all possible variations thereof is encompassed by the invention unless otherwise indicated herein or otherwise clearly contradicted by context. Those skilled in the art will recognize or be able to ascertain using no more than routine experimentation, many equivalents to the specific embodiments of the invention described herein. Such equivalents are intended to be encompassed by the following claims.

The application's sequence listing, which the Patent Office published only in electronic form, follows.

SEQUENCE LISTING (11113 sequences)

SEQ ID NO: 1 - protein, 8 aa, Artificial Sequence
  Synthetic
GFNIKDDY

SEQ ID NO: 2 - protein, 8 aa, Artificial Sequence
  Synthetic
IDPENGDT

SEQ ID NO: 3 - protein, 10 aa, Artificial Sequence
  Synthetic
TLWLRRGLDY

SEQ ID NO: 4 - protein, 11 aa, Artificial Sequence
  Synthetic
KSLLHSNGYTY

SEQ ID NO: 5 - protein, 3 aa, Artificial Sequence
  Synthetic
RMS

SEQ ID NO: 6 - protein, 9 aa, Artificial Sequence
  Synthetic
MQHLEYPFT

SEQ ID NO: 7 - protein, 5 aa, Artificial Sequence
  Synthetic
DDYMY

SEQ ID NO: 8 - protein, 17 aa, Artificial Sequence
  Synthetic
WIDPENGDTEYASKFQD

SEQ ID NO: 9 - protein, 8 aa, Artificial Sequence
  Synthetic
WLRRGLDY

SEQ ID NO: 10 - protein, 16 aa, Artificial Sequence
  Synthetic
RSSKSLLHSNGYTYLF

SEQ ID NO: 11 - protein, 7 aa, Artificial Sequence
  Synthetic
RMSNLAS

SEQ ID NO: 12 - protein, 7 aa, Artificial Sequence
  Synthetic
GFNIKDD

SEQ ID NO: 13 - protein, 3 aa, Artificial Sequence
  Synthetic
ENG

SEQ ID NO: 14 - protein, 6 aa, Artificial Sequence
  Synthetic
LRRGLD

SEQ ID NO: 15 - protein, 12 aa, Artificial Sequence
  Synthetic
SKSLLHSNGYTY

SEQ ID NO: 16 - protein, 6 aa, Artificial Sequence
  Synthetic
HLEYPF

SEQ ID NO: 17 - protein, 117 aa, Artificial Sequence
  Synthetic
EVQLQQSGAELVRPGASVKLSCTASGFNIKDDYMYWVKQRPEQGLEWIGWIDPENGDTEYASKFQDKATVTADTSSNTAYLQLSSLTSEDTAVYYCTLWLRRGLDYWGQGTSVTVSS

SEQ ID NO: 18 - protein, 112 aa, Artificial Sequence
  Synthetic
DIVMTQAAPSVPVTPGESVSISCRSSKSLLHSNGYTYLFWFLQRPGQSPQLLIYRMSNLASGVPDRFSGSGSGTAFTLRISRVEAEDVGVYYCMQHLEYPFTFGGGTKLEIK

SEQ ID NO: 19 - protein, 8 aa, Artificial Sequence
  Synthetic
IDPETGDT

SEQ ID NO: 20 - protein, 17 aa, Artificial Sequence
  Synthetic
WIDPETGDTEYASKFQD

SEQ ID NO: 21 - protein, 3 aa, Artificial Sequence
  Synthetic
ETG

SEQ ID NO: 22 - protein, 117 aa, Artificial Sequence
  Synthetic
EVQLQQSGAELVRPGASVKLSCTASGFNIKDDYMYWVKQRPEQGLEWIGWIDPETGDTEYASKFQDKATVTADTSSNTAYLQLSSLTSEDTAVYYCTLWLRRGLDYWGQGTSVTVSS

SEQ ID NO: 23 - protein, 8 aa, Artificial Sequence
  Synthetic
IDPESGDT

SEQ ID NO: 24 - protein, 17 aa, Artificial Sequence
  Synthetic
WIDPESGDTEYASKFQD

SEQ ID NO: 25 - protein, 3 aa, Artificial Sequence
  Synthetic
ESG

SEQ ID NO: 26 - protein, 117 aa, Artificial Sequence
  Synthetic
EVQLQQSGAELVRPGASVKLSCTASGFNIKDDYMYWVKQRPEQGLEWIGWIDPESGDTEYASKFQDKATVTADTSSNTAYLQLSSLTSEDTAVYYCTLWLRRGLDYWGQGTSVTVSS

SEQ ID NO: 27 - protein, 9 aa, Artificial Sequence
  Synthetic
GYSITSGYY

SEQ ID NO: 28 - protein, 7 aa, Artificial Sequence
  Synthetic
ITFDGAN

SEQ ID NO: 29 - protein, 12 aa, Artificial Sequence
  Synthetic
TRSSYDYDVLDY

SEQ ID NO: 30 - protein, 6 aa, Artificial Sequence
  Synthetic
QDISNF

SEQ ID NO: 31 - protein, 3 aa, Artificial Sequence
  Synthetic
YTS

SEQ ID NO: 32 - protein, 9 aa, Artificial Sequence
  Synthetic
QQGHTLPYT

SEQ ID NO: 33 - protein, 6 aa, Artificial Sequence
  Synthetic
SGYYWN

SEQ ID NO: 34 - protein, 16 aa, Artificial Sequence
  Synthetic
YITFDGANNYNPSLKN

SEQ ID NO: 35 - protein, 10 aa, Artificial Sequence
  Synthetic
SSYDYDVLDY

SEQ ID NO: 36 - protein, 11 aa, Artificial Sequence
  Synthetic
RASQDISNFLN

SEQ ID NO: 37 - protein, 7 aa, Artificial Sequence
  Synthetic
YTSRLHS

SEQ ID NO: 38 - protein, 8 aa, Artificial Sequence
  Synthetic
GYSITSGY

SEQ ID NO: 39 - protein, 3 aa, Artificial Sequence
  Synthetic
FDG

SEQ ID NO: 40 - protein, 8 aa, Artificial Sequence
  Synthetic
SYDYDVLD

SEQ ID NO: 41 - protein, 7 aa, Artificial Sequence
  Synthetic
SQDISNF

SEQ ID NO: 42 - protein, 6 aa, Artificial Sequence
  Synthetic
GHTLPY

SEQ ID NO: 43 - protein, 119 aa, Artificial Sequence
  Synthetic
DVQLQESGPGLVKPSQSLSLTCSVTGYSITSGYYWNWIRQFPGNKLEWMGYITFDGANNYNPSLKNRISITRDTSKNQFFLKLTSVTTEDTATYYCTRSSYDYDVLDYWGQGTTLTVSS

SEQ ID NO: 44 - protein, 107 aa, Artificial Sequence
  Synthetic
DIQMTQTTSSLSASLGDRVTISCRASQDISNFLNWYQQRPDGTVKLLIYYTSRLHSGVPSRFSGSGSGTDFSLTVSNLEQEDIATYFCQQGHTLPYTFGGGTKLEIK

SEQ ID NO: 45 - protein, 8 aa, Artificial Sequence
  Synthetic
GYSFTDYC

SEQ ID NO: 46 - protein, 8 aa, Artificial Sequence
  Synthetic
IYPGSGNT

SEQ ID NO: 47 - protein, 13 aa, Artificial Sequence
  Synthetic
AREDYYPYHGMDY

SEQ ID NO: 48 - protein, 10 aa, Artificial Sequence
  Synthetic
ESVDGYDNSF

SEQ ID NO: 49 - protein, 3 aa, Artificial Sequence
  Synthetic
RAS

SEQ ID NO: 50 - protein, 9 aa, Artificial Sequence
  Synthetic
QQSSEDPWT

SEQ ID NO: 51 - protein, 5 aa, Artificial Sequence
  Synthetic
DYCIN

SEQ ID NO: 52 - protein, 17 aa, Artificial Sequence
  Synthetic
WIYPGSGNTRYSERFKG

SEQ ID NO: 53 - protein, 11 aa, Artificial Sequence
  Synthetic
EDYYPYHGMDY

SEQ ID NO: 54 - protein, 15 aa, Artificial Sequence
  Synthetic
RASESVDGYDNSFMH

SEQ ID NO: 55 - protein, 7 aa, Artificial Sequence
  Synthetic
RASNLES

SEQ ID NO: 56 - protein, 7 aa, Artificial Sequence
  Synthetic
GYSFTDY

SEQ ID NO: 57 - protein, 3 aa, Artificial Sequence
  Synthetic
GSG

SEQ ID NO: 58 - protein, 9 aa, Artificial Sequence
  Synthetic
DYYPYHGMD

SEQ ID NO: 59 - protein, 11 aa, Artificial Sequence
  Synthetic
SESVDGYDNSF

SEQ ID NO: 60 - protein, 6 aa, Artificial Sequence
  Synthetic
SSEDPW

SEQ ID NO: 61 - protein, 120 aa, Artificial Sequence
  Synthetic
QIQLQQSGPELVRPGASVKISCKASGYSFTDYCINWVNQRPGQGLEWIGWIYPGSGNTRYSERFKGKATLTVDTSSNTAYMQLSSLTSEDSAVYFCAREDYYPYHGMDYWGQGTSVTVSS

SEQ ID NO: 62 - protein, 111 aa, Artificial Sequence
  Synthetic
DIVLTQSPTSLAVSLGQRATISCRASESVDGYDNSFMHWYQQKPGQPPKLLIFRASNLESGIPARFSGSGSRTDFTLTINPVEAADVATYYCQQSSEDPWTFGGGTKLEIK

SEQ ID NO: 63 - protein, 8 aa, Artificial Sequence
  Synthetic
GYSFTDYY

SEQ ID NO: 64 - protein, 5 aa, Artificial Sequence
  Synthetic
DYYIN

SEQ ID NO: 65 - protein, 120 aa, Artificial Sequence
  Synthetic
QIQLQQSGPELVRPGASVKISCKASGYSFTDYYINWVNQRPGQGLEWIGWIYPGSGNTRYSERFKGKATLTVDTSSNTAYMQLSSLTSEDSAVYFCAREDYYPYHGMDYWGQGTSVTVSS

SEQ ID NO: 66 - protein, 8 aa, Artificial Sequence
  Synthetic
GYSFTDYD

SEQ ID NO: 67 - protein, 5 aa, Artificial Sequence
  Synthetic
DYDIN

SEQ ID NO: 68 - protein, 120 aa, Artificial Sequence
  Synthetic
QIQLQQSGPELVRPGASVKISCKASGYSFTDYDINWVNQRPGQGLEWIGWIYPGSGNTRYSERFKGKATLTVDTSSNTAYMQLSSLTSEDSAVYFCAREDYYPYHGMDYWGQGTSVTVSS

SEQ ID NO: 69 - protein, 117 aa, Artificial Sequence
  Synthetic
EVQLVQSGSELKKPGASVKVSCTASGFNIKDDYMYWVRQPPGKGLEWIGWIDPETGDTEYASKFQDRVTVTADTSTNTAYMELSSLRSEDTAVYYCTLWLRRGLDYWGQGTLVTVSS

SEQ ID NO: 70 - protein, 112 aa, Artificial Sequence
  Synthetic
DIVMTQSPLSLPVTPGEPASISCRSSKSLLHSNGYTYLFWFQQRPGQSPRLLIYRMSNLASGVPDRFSGSGSGTDFTLKISRVEAEDVGVYYCMQHLEYPFTFGGGTKVEIK

SEQ ID NO: 71 - protein, 117 aa, Artificial Sequence
  Synthetic
EVQLVQSGSELKKPGASVKVSCTASGFNIKDDYMYWVRQPPGKGLEWIGWIDPESGDTEYASKFQDRVTVTADTSTNTAYMELSSLRSEDTAVYYCTLWLRRGLDYWGQGTLVTVSS

SEQ ID NO: 72 - protein, 117 aa, Artificial Sequence
  Synthetic
EVQLVQSGSELKKPGASVKVSCTASGFNIKDDYMYWVRQPPGKGLEWIGWIDPENGDTEYASKFQDRVTVTADTSTNTAYMELSSLRSEDTAVYYCTLWLRRGLDYWGQGTLVTVSS

SEQ ID NO: 73 - protein, 119 aa, Artificial Sequence
  Synthetic
QVQLQESGPGLVKPSQTLSLTCSVTGYSITSGYYWNWIRQPPGKGLEWMGYITFDGANNYNPSLKNRVSISRDTSKNQFSLKLSSVTAEDTATYYCTRSSYDYDVLDYWGQGTTVTVSS

SEQ ID NO: 74 - protein, 107 aa, Artificial Sequence
  Synthetic
DIQMTQSPSSLSASVGDRVTITCRASQDISNFLNWYQQKPGQPVKLLIYYTSRLHSGVPSRFSGSGSGTDFTLTISSLQPEDFATYFCQQGHTLPYTFGQGTKLEIK

SEQ ID NO: 75 - protein, 107 aa, Artificial Sequence
  Synthetic
DIQMTQSPSSLSASVGDRVTITCRASQDISNFLNWYQQKPGQPVKLLIYYTSRLHSGVPSRFSGSGSGTDFTLTISSLQPEDFATYYCQQGHTLPYTFGQGTKLEIK

SEQ ID NO: 76 - protein, 119 aa, Artificial Sequence
  Synthetic
QVQLQESGPGLVKPSQTLSLTCTVTGYSITSGYYWNWIRQPPGKGLEWIGYITFDGANNYNPSLKNRVSISRDTSKNQFSLKLSSVTAEDTATYYCTRSSYDYDVLDYWGQGTTVTVSS

SEQ ID NO: 77 - protein, 120 aa, Artificial Sequence
  Synthetic
QVQLVQSGAEVKKPGASVKVSCKASGYSFTDYYINWVRQAPGQGLEWMGWIYPGSGNTRYSERFKGRVTITRDTSASTAYMELSSLRSEDTAVYYCAREDYYPYHGMDYWGQGTLVTVSS

SEQ ID NO: 78 - protein, 111 aa, Artificial Sequence
  Synthetic
DIVLTQSPDSLAVSLGERATINCRASESVDGYDNSFMHWYQQKPGQPPKLLIFRASNLESGVPDRFSGSGSRTDFTLTISSLQAEDVAVYYCQQSSEDPWTFGQGTKLEIK

SEQ ID NO: 79 - protein, 120 aa, Artificial Sequence
  Synthetic
QVQLVQSGAEVKKPGASVKVSCKASGYSFTDYDINWVRQAPGQGLEWMGWIYPGSGNTRYSERFKGRVTITRDTSASTAYMELSSLRSEDTAVYYCAREDYYPYHGMDYWGQGTLVTVSS

SEQ ID NO: 80 - protein, 111 aa, Artificial Sequence
  Synthetic
DIVMTQSPDSLAVSLGERATINCRASESVDGYDNSFMHWYQQKPGQPPKLLIFRASNLESGVPDRFSGSGSGTDFTLTISSLQAEDVAVYYCQQSSEDPWTFGQGTKLEIK

SEQ ID NO: 81 - protein, 330 aa, Artificial Sequence [sequence omitted]

SEQ ID NO: 82 - protein, 330 aa, Artificial Sequence
  Synthetic
ASTKGPSVFPLAPSSKSTSGGTAALGCLVKDYFPEPVTVSWNSGALTSGVHTFPAVLQSSGLYSLSSVVTVPSSSLGTQTYICNVNHKPSNTKVDKKVEPKSCDKTHTCPPCPAPEAAGGPSVFLFPPKPKDTLMISRTPEVTCVVVDVSHEDPEVKFNWYVDGVEVHNAKTKPREEQYNSTYRVVSVLTVLHQDWLNGKEYKCKVSNKALPAPIEKTISKAKGQPREPQVYTLPPSRDELTKNQVSLTCLVKGFYPSDIAVEWESNGQPENNYKTTPPVLDSDGSFFLYSKLTVDKSRWQQGNVFSCSVMHEALHNHYTQKSLSLSPGK

SEQ ID NO: 83 - protein, 107 aa, Artificial Sequence [sequence omitted]

SEQ ID NO: 84 - protein, 447 aa, Artificial Sequence
  Synthetic
EVQLVQSGSELKKPGASVKVSCTASGFNIKDDYMYWVRQPPGKGLEWIGWIDPETGDTEYASKFQDRVTVTADTSTNTAYMELSSLRSEDTAVYYCTLWLRRGLDYWGQGTLVTVSSASTKGPSVFPLAPSSKSTSGGTAALGCLVKDYFPEPVTVSWNSGALTSGVHTFPAVLQSSGLYSLSSVVTVPSSSLGTQTYICNVNHKPSNTKVDKKVEPKSCDKTHTCPPCPAPELLGGPSVFLFPPKPKDTLMISRTPEVTCVVVDVSHEDPEVKFNWYVDGVEVHNAKTKPREEQYNSTYRVVSVLTVLHQDWLNGKEYKCKVSNKALPAPIEKTISKAKGQPREPQVYTLPPSRDELTKNQVSLTCLVKGFYPSDIAVEWESNGQPENNYKTTPPVLDSDGSFFLYSKLTVDKSRWQQGNVFSCSVMHEALHNHYTQKSLSLSPGK

SEQ ID NO: 85 - protein, 219 aa, Artificial Sequence
  Synthetic
DIVMTQSPLSLPVTPGEPASISCRSSKSLLHSNGYTYLFWFQQRPGQSPRLLIYRMSNLASGVPDRFSGSGSGTDFTLKISRVEAEDVGVYYCMQHLEYPFTFGGGTKVEIKRTVAAPSVFIFPPSDEQLKSGTASVVCLLNNFYPREAKVQWKVDNALQSGNSQESVTEQDSKDSTYSLSSTLTLSKADYEKHKVYACEVTHQGLSSPVTKSFNRGEC

SEQ ID NO: 86 - protein, 447 aa, Artificial Sequence
  Synthetic
EVQLVQSGSELKKPGASVKVSCTASGFNIKDDYMYWVRQPPGKGLEWIGWIDPESGDTEYASKFQDRVTVTADTSTNTAYMELSSLRSEDTAVYYCTLWLRRGLDYWGQGTLVTVSSASTKGPSVFPLAPSSKSTSGGTAALGCLVKDYFPEPVTVSWNSGALTSGVHTFPAVLQSSGLYSLSSVVTVPSSSLGTQTYICNVNHKPSNTKVDKKVEPKSCDKTHTCPPCPAPELLGGPSVFLFPPKPKDTLMISRTPEVTCVVVDVSHEDPEVKFNWYVDGVEVHNAKTKPREEQYNSTYRVVSVLTVLHQDWLNGKEYKCKVSNKALPAPIEKTISKAKGQPREPQVYTLPPSRDELTKNQVSLTCLVKGFYPSDIAVEWESNGQPENNYKTTPPVLDSDGSFFLYSKLTVDKSRWQQGNVFSCSVMHEALHNHYTQKSLSLSPGK

SEQ ID NO: 87 - protein, 447 aa, Artificial Sequence
  Synthetic
EVQLVQSGSELKKPGASVKVSCTASGFNIKDDYMYWVRQPPGKGLEWIGWIDPENGDTEYASKFQDRVTVTADTSTNTAYMELSSLRSEDTAVYYCTLWLRRGLDYWGQGTLVTVSSASTKGPSVFPLAPSSKSTSGGTAALGCLVKDYFPEPVTVSWNSGALTSGVHTFPAVLQSSGLYSLSSVVTVPSSSLGTQTYICNVNHKPSNTKVDKKVEPKSCDKTHTCPPCPAPELLGGPSVFLFPPKPKDTLMISRTPEVTCVVVDVSHEDPEVKFNWYVDGVEVHNAKTKPREEQYNSTYRVVSVLTVLHQDWLNGKEYKCKVSNKALPAPIEKTISKAKGQPREPQVYTLPPSRDELTKNQVSLTCLVKGFYPSDIAVEWESNGQPENNYKTTPPVLDSDGSFFLYSKLTVDKSRWQQGNVFSCSVMHEALHNHYTQKSLSLSPGK

SEQ ID NO: 88 - protein, 449 aa, Artificial Sequence
  Synthetic
QVQLQESGPGLVKPSQTLSLTCSVTGYSITSGYYWNWIRQPPGKGLEWMGYITFDGANNYNPSLKNRVSISRDTSKNQFSLKLSSVTAEDTATYYCTRSSYDYDVLDYWGQGTTVTVSSASTKGPSVFPLAPSSKSTSGGTAALGCLVKDYFPEPVTVSWNSGALTSGVHTFPAVLQSSGLYSLSSVVTVPSSSLGTQTYICNVNHKPSNTKVDKKVEPKSCDKTHTCPPCPAPELLGGPSVFLFPPKPKDTLMISRTPEVTCVVVDVSHEDPEVKFNWYVDGVEVHNAKTKPREEQYNSTYRVVSVLTVLHQDWLNGKEYKCKVSNKALPAPIEKTISKAKGQPREPQVYTLPPSRDELTKNQVSLTCLVKGFYPSDIAVEWESNGQPENNYKTTPPVLDSDGSFFLYSKLTVDKSRWQQGNVFSCSVMHEALHNHYTQKSLSLSPGK

SEQ ID NO: 89 - protein, 214 aa, Artificial Sequence
  Synthetic
DIQMTQSPSSLSASVGDRVTITCRASQDISNFLNWYQQKPGQPVKLLIYYTSRLHSGVPSRFSGSGSGTDFTLTISSLQPEDFATYFCQQGHTLPYTFGQGTKLEIKRTVAAPSVFIFPPSDEQLKSGTASVVCLLNNFYPREAKVQWKVDNALQSGNSQESVTEQDSKDSTYSLSSTLTLSKADYEKHKVYACEVTHQGLSSPVTKSFNRGEC

SEQ ID NO: 90 - protein, 214 aa, Artificial Sequence
  Synthetic
DIQMTQSPSSLSASVGDRVTITCRASQDISNFLNWYQQKPGQPVKLLIYYTSRLHSGVPSRFSGSGSGTDFTLTISSLQPEDFATYYCQQGHTLPYTFGQGTKLEIKRTVAAPSVFIFPPSDEQLKSGTASVVCLLNNFYPREAKVQWKVDNALQSGNSQESVTEQDSKDSTYSLSSTLTLSKADYEKHKVYACEVTHQGLSSPVTKSFNRGEC

SEQ ID NO: 91 - protein, 449 aa, Artificial Sequence
  Synthetic
QVQLQESGPGLVKPSQTLSLTCTVTGYSITSGYYWNWIRQPPGKGLEWIGYITFDGANNYNPSLKNRVSISRDTSKNQFSLKLSSVTAEDTATYYCTRSSYDYDVLDYWGQGTTVTVSSASTKGPSVFPLAPSSKSTSGGTAALGCLVKDYFPEPVTVSWNSGALTSGVHTFPAVLQSSGLYSLSSVVTVPSSSLGTQTYICNVNHKPSNTKVDKKVEPKSCDKTHTCPPCPAPELLGGPSVFLFPPKPKDTLMISRTPEVTCVVVDVSHEDPEVKFNWYVDGVEVHNAKTKPREEQYNSTYRVVSVLTVLHQDWLNGKEYKCKVSNKALPAPIEKTISKAKGQPREPQVYTLPPSRDELTKNQVSLTCLVKGFYPSDIAVEWESNGQPENNYKTTPPVLDSDGSFFLYSKLTVDKSRWQQGNVFSCSVMHEALHNHYTQKSLSLSPGK

SEQ ID NO: 92 - protein, 450 aa, Artificial Sequence
  Synthetic
QVQLVQSGAEVKKPGASVKVSCKASGYSFTDYYINWVRQAPGQGLEWMGWIYPGSGNTRYSERFKGRVTITRDTSASTAYMELSSLRSEDTAVYYCAREDYYPYHGMDYWGQGTLVTVSSASTKGPSVFPLAPSSKSTSGGTAALGCLVKDYFPEPVTVSWNSGALTSGVHTFPAVLQSSGLYSLSSVVTVPSSSLGTQTYICNVNHKPSNTKVDKKVEPKSCDKTHTCPPCPAPELLGGPSVFLFPPKPKDTLMISRTPEVTCVVVDVSHEDPEVKFNWYVDGVEVHNAKTKPREEQYNSTYRVVSVLTVLHQDWLNGKEYKCKVSNKALPAPIEKTISKAKGQPREPQVYTLPPSRDELTKNQVSLTCLVKGFYPSDIAVEWESNGQPENNYKTTPPVLDSDGSFFLYSKLTVDKSRWQQGNVFSCSVMHEALHNHYTQKSLSLSPGK

SEQ ID NO: 93 - protein, 218 aa, Artificial Sequence
  Synthetic
DIVLTQSPDSLAVSLGERATINCRASESVDGYDNSFMHWYQQKPGQPPKLLIFRASNLESGVPDRFSGSGSRTDFTLTISSLQAEDVAVYYCQQSSEDPWTFGQGTKLEIKRTVAAPSVFIFPPSDEQLKSGTASVVCLLNNFYPREAKVQWKVDNALQSGNSQESVTEQDSKDSTYSLSSTLTLSKADYEKHKVYACEVTHQGLSSPVTKSFNRGEC

SEQ ID NO: 94 - protein, 450 aa, Artificial Sequence
  Synthetic
QVQLVQSGAEVKKPGASVKVSCKASGYSFTDYDINWVRQAPGQGLEWMGWIYPGSGNTRYSERFKGRVTITRDTSASTAYMELSSLRSEDTAVYYCAREDYYPYHGMDYWGQGTLVTVSSASTKGPSVFPLAPSSKSTSGGTAALGCLVKDYFPEPVTVSWNSGALTSGVHTFPAVLQSSGLYSLSSVVTVPSSSLGTQTYICNVNHKPSNTKVDKKVEPKSCDKTHTCPPCPAPELLGGPSVFLFPPKPKDTLMISRTPEVTCVVVDVSHEDPEVKFNWYVDGVEVHNAKTKPREEQYNSTYRVVSVLTVLHQDWLNGKEYKCKVSNKALPAPIEKTISKAKGQPREPQVYTLPPSRDELTKNQVSLTCLVKGFYPSDIAVEWESNGQPENNYKTTPPVLDSDGSFFLYSKLTVDKSRWQQGNVFSCSVMHEALHNHYTQKSLSLSPGK

SEQ ID NO: 95 - protein, 218 aa, Artificial Sequence
  Synthetic
DIVMTQSPDSLAVSLGERATINCRASESVDGYDNSFMHWYQQKPGQPPKLLIFRASNLESGVPDRFSGSGSGTDFTLTISSLQAEDVAVYYCQQSSEDPWTFGQGTKLEIKRTVAAPSVFIFPPSDEQLKSGTASVVCLLNNFYPREAKVQWKVDNALQSGNSQESVTEQDSKDSTYSLSSTLTLSKADYEKHKVYACEVTHQGLSSPVTKSFNRGEC

SEQ ID NO: 96 - protein, 108 aa, Artificial Sequence
  Synthetic
ASTKGPSVFPLAPSSKSTSGGTAALGCLVKDYFPEPVTVSWNSGALTSGVHTFPAVLQSSGLYSLSSVVTVPSSSLGTQTYICNVNHKPSNTKVDKKVEPKSCDKTHT

SEQ ID NO: 97 - protein, 225 aa, Artificial Sequence
  Synthetic
EVQLVQSGSELKKPGASVKVSCTASGFNIKDDYMYWVRQPPGKGLEWIGWIDPETGDTEYASKFQDRVTVTADTSTNTAYMELSSLRSEDTAVYYCTLWLRRGLDYWGQGTLVTVSSASTKGPSVFPLAPSSKSTSGGTAALGCLVKDYFPEPVTVSWNSGALTSGVHTFPAVLQSSGLYSLSSVVTVPSSSLGTQTYICNVNHKPSNTKVDKKVEPKSCDKTHT

SEQ ID NO: 98 - protein, 225 aa, Artificial Sequence
  Synthetic
EVQLVQSGSELKKPGASVKVSCTASGFNIKDDYMYWVRQPPGKGLEWIGWIDPESGDTEYASKFQDRVTVTADTSTNTAYMELSSLRSEDTAVYYCTLWLRRGLDYWGQGTLVTVSSASTKGPSVFPLAPSSKSTSGGTAALGCLVKDYFPEPVTVSWNSGALTSGVHTFPAVLQSSGLYSLSSVVTVPSSSLGTQTYICNVNHKPSNTKVDKKVEPKSCDKTHT

SEQ ID NO: 99 - protein, 225 aa, Artificial Sequence
  Synthetic
EVQLVQSGSELKKPGASVKVSCTASGFNIKDDYMYWVRQPPGKGLEWIGWIDPENGDTEYASKFQDRVTVTADTSTNTAYMELSSLRSEDTAVYYCTLWLRRGLDYWGQGTLVTVSSASTKGPSVFPLAPSSKSTSGGTAALGCLVKDYFPEPVTVSWNSGALTSGVHTFPAVLQSSGLYSLSSVVTVPSSSLGTQTYICNVNHKPSNTKVDKKVEPKSCDKTHT

SEQ ID NO: 100 - protein, 227 aa, Artificial Sequence
  Synthetic
QVQLQESGPGLVKPSQTLSLTCSVTGYSITSGYYWNWIRQPPGKGLEWMGYITFDGANNYNPSLKNRVSISRDTSKNQFSLKLSSVTAEDTATYYCTRSSYDYDVLDYWGQGTTVTVSSASTKGPSVFPLAPSSKSTSGGTAALGCLVKDYFPEPVTVSWNSGALTSGVHTFPAVLQSSGLYSLSSVVTVPSSSLGTQTYICNVNHKPSNTKVDKKVEPKSCDKTHT

SEQ ID NO: 101 - protein, 227 aa, Artificial Sequence
  Synthetic
QVQLQESGPGLVKPSQTLSLTCTVTGYSITSGYYWNWIRQPPGKGLEWIGYITFDGANNYNPSLKNRVSISRDTSKNQFSLKLSSVTAEDTATYYCTRSSYDYDVLDYWGQGTTVTVSSASTKGPSVFPLAPSSKSTSGGTAALGCLVKDYFPEPVTVSWNSGALTSGVHTFPAVLQSSGLYSLSSVVTVPSSSLGTQTYICNVNHKPSNTKVDKKVEPKSCDKTHT

SEQ ID NO: 102 - protein, 228 aa, Artificial Sequence
  Synthetic
QVQLVQSGAEVKKPGASVKVSCKASGYSFTDYYINWVRQAPGQGLEWMGWIYPGSGNTRYSERFKGRVTITRDTSASTAYMELSSLRSEDTAVYYCAREDYYPYHGMDYWGQGTLVTVSSASTKGPSVFPLAPSSKSTSGGTAALGCLVKDYFPEPVTVSWNSGALTSGVHTFPAVLQSSGLYSLSSVVTVPSSSLGTQTYICNVNHKPSNTKVDKKVEPKSCDKTHT

SEQ ID NO: 103 - protein, 228 aa, Artificial Sequence
  Synthetic
QVQLVQSGAEVKKPGASVKVSCKASGYSFTDYDINWVRQAPGQGLEWMGWIYPGSGNTRYSERFKGRVTITRDTSASTAYMELSSLRSEDTAVYYCAREDYYPYHGMDYWGQGTLVTVSSASTKGPSVFPLAPSSKSTSGGTAALGCLVKDYFPEPVTVSWNSGALTSGVHTFPAVLQSSGLYSLSSVVTVPSSSLGTQTYICNVNHKPSNTKVDKKVEPKSCDKTHT

SEQ ID NO: 104 - protein, 19 aa, Artificial Sequence
  Synthetic
MGWSCIILFLVATATGVHS

SEQ ID NO: 105 - protein, 760 aa, Homo sapiens
MMDQARSAFSNLFGGEPLSYTRFSLARQVDGDNSHVEMKLAVDEEENADNNTKANVTKPKRCSGSICYGTIAVIVFFLIGFMIGYLGYCKGVEPKTECERLAGTESPVREEPGEDFPAARRLYWDDLKRKLSEKLDSTDFTGTIKLLNENSYVPREAGSQKDENLALYVENQFREFKLSKVWRDQHFVKIQVKDSAQNSVIIVDKNGRLVYLVENPGGYVAYSKAATVTGKLVHANFGTKKDFEDLYTPVNGSIVIVRAGKITFAEKVANAESLNAIGVLIYMDQTKFPIVNAELSFFGHAHLGTGDPYTPGFPSFNHTQFPPSRSSGLPNIPVQTISRAAAEKLFGNMEGDCPSDWKTDSTCRMVTSESKNVKLTVSNVLKEIKILNIFGVIKGFVEPDHYVVVGAQRDAWGPGAAKSGVGTALLLKLAQMFSDMVLKDGFQPSRSIIFASWSAGDFGSVGATEWLEGYLSSLHLKAFTYINLDKAVLGTSNFKVSASPLLYTLIEKTMQNVKHPVTGQFLYQDSNWASKVEKLTLDNAAFPFLAYSGIPAVSFCFCEDTDYPYLGTTMDTYKELIERIPELNKVARAAAEVAGQFVIKLTHDVELNLDYERYNSQLLSFVRDLNQYRADIKEMGLSLQWLYSARGDFFRATSRLTTDFGNAEKTDRFVMKKLNDRVMRVEYHFLSPYVSPKESPFRHVFWGSGSHTLPALLENLKLRKQNNGAFNETLFRNQLALATWTIQGAANALSGDVWDIDNEF

SEQ ID NO: 106 - protein, 760 aa, Macaca mulatta
MMDQARSAFSNLFGGEPLSYTRFSLARQVDGDNSHVEMKLGVDEEENTDNNTKPNGTKPKRCGGNICYGTIAVIIFFLIGFMIGYLGYCKGVEPKTECERLAGTESPAREEPEEDFPAAPRLYWDDLKRKLSEKLDTTDFTSTIKLLNENLYVPREAGSQKDENLALYIENQFREFKLSKVWRDQHFVKIQVKDSAQNSVIIVDKNGGLVYLVENPGGYVAYSKAATVTGKLVHANFGTKKDFEDLDSPVNGSIVIVRAGKITFAEKVANAESLNAIGVLIYMDQTKFPIVKADLSFFGHAHLGTGDPYTPGFPSFNHTQFPPSQSSGLPNIPVQTISRAAAEKLFGNMEGDCPSDWKTDSTCKMVTSENKSVKLTVSNVLKETKILNIFGVIKGFVEPDHYVVVGAQRDAWGPGAAKSSVGTALLLKLAQMFSDMVLKDGFQPSRSIIFASWSAGDFGSVGATEWLEGYLSSLHLKAFTYINLDKAVLGTSNFKVSASPLLYTLIEKTMQDVKHPVTGRSLYQDSNWASKVEKLTLDNAAFPFLAYSGIPAVSFCFCEDTDYPYLGTTMDTYKELVERIPELNKVARAAAEVAGQFVIKLTHDTELNLDYERYNSQLLLFLRDLNQYRADVKEMGLSLQWLYSARGDFFRATSRLTTDFRNAEKRDKFVMKKLNDRVMRVEYYFLSPYVSPKESPFRHVFWGSGSHTLSALLESLKLRRQNNSAFNETLFRNQLALATWTIQGAANALSGDVWDIDNEF

SEQ ID NO: 107 - protein, 760 aa, Macaca fascicularis
MMDQARSAFSNLFGGEPLSYTRFSLARQVDGDNSHVEMKLGVDEEENTDNNTKANGTKPKRCGGNICYGTIAVIIFFLIGFMIGYLGYCKGVEPKTECERLAGTESPAREEPEEDFPAAPRLYWDDLKRKLSEKLDTTDFTSTIKLLNENLYVPREAGSQKDENLALYIENQFREFKLSKVWRDQHFVKIQVKDSAQNSVIIVDKNGGLVYLVENPGGYVAYSKAATVTGKLVHANFGTKKDFEDLDSPVNGSIVIVRAGKITFAEKVANAESLNAIGVLIYMDQTKFPIVKADLSFFGHAHLGTGDPYTPGFPSFNHTQFPPSQSSGLPNIPVQTISRAAAEKLFGNMEGDCPSDWKTDSTCKMVTSENKSVKLTVSNVLKETKILNIFGVIKGFVEPDHYVVVGAQRDAWGPGAAKSSVGTALLLKLAQMFSDMVLKDGFQPSRSIIFASWSAGDFGSVGATEWLEGYLSSLHLKAFTYINLDKAVLGTSNFKVSASPLLYTLIEKTMQDVKHPVTGRSLYQDSNWASKVEKLTLDNAAFPFLAYSGIPAVSFCFCEDTDYPYLGTTMDTYKELVERIPELNKVARAAAEVAGQFVIKLTHDTELNLDYERYNSQLLLFLRDLNQYRADVKEMGLSLQWLYSARGDFFRATSRLTTDFRNAEKRDKFVMKKLNDRVMRVEYYFLSPYVSPKESPFRHVFWGSGSHTLSALLESLKLRRQNNSAFNETLFRNQLALATWTIQGAANALSGDVWDIDNEF

SEQ ID NO: 108 - protein, 763 aa, Mus musculus
MMDQARSAFSNLFGGEPLSYTRFSLARQVDGDNSHVEMKLAADEEENADNNMKASVRKPKRFNGRLCFAAIALVIFFLIGFMSGYLGYCKRVEQKEECVKLAETEETDKSETMETEDVPTSSRLYWADLKTLLSEKLNSIEFADTIKQLSQNTYTPREAGSQKDESLAYYIENQFHEFKFSKVWRDEHYVKIQVKSSIGQNMVTIVQSNGNLDPVESPEGYVAFSKPTEVSGKLVHANFGTKKDFEELSYSVNGSLVIVRAGEITFAEKVANAQSFNAIGVLIYMDKNKFPVVEADLALFGHAHLGTGDPYTPGFPSFNHTQFPPSQSSGLPNIPVQTISRAAAEKLFGKMEGSCPARWNIDSSCKLELSQNQNVKLIVKNVLKERRILNIFGVIKGYEEPDRYVVVGAQRDALGAGVAAKSSVGTGLLLKLAQVFSDMISKDGFRPSRSIIFASWTAGDFGAVGATEWLEGYLSSLHLKAFTYINLDKVVLGTSNFKVSASPLLYTLMGKIMQDVKHPVDGKSLYRDSNWISKVEKLSFDNAAYPFLAYSGIPAVSFCFCEDADYPYLGTRLDTYEALTQKVPQLNQMVRTAAEVAGQLIIKLTHDVELNLDYEMYNSKLLSFMKDLNQFKTDIRDMGLSLQWLYSARGDYFRATSRLTTDFHNAEKTNRFVMREINDRIMKVEYHFLSPYVSPRESPFRHIFWGSGSHTLSALVENLKLRQKNITAFNETLFRNQLALATWTIQGVANALSGDIWNIDNEF

SEQ ID NO: 109 - protein, 197 aa, Artificial Sequence
  Synthetic
FVKIQVKDSAQNSVIIVDKNGRLVYLVENPGGYVAYSKAATVTGKLVHANFGTKKDFEDLYTPVNGSIVIVRAGKITFAEKVANAESLNAIGVLIYMDQTKFPIVNAELSFFGHAHLGTGDPYTPGFPSFNHTQFPPSRSSGLPNIPVQTISRAAAEKLFGNMEGDCPSDWKTDSTCRMVTSESKNVKLTVSNVLKE

SEQ ID NO: 110 - protein, 5 aa, Artificial Sequence
  Synthetic
SYWMH

SEQ ID NO: 111 - protein, 17 aa, Artificial Sequence
  Synthetic
EINPTNGRTNYIEKFKS

SEQ ID NO: 112 - protein, 7 aa, Artificial Sequence
  Synthetic
GTRAYHY

SEQ ID NO: 113 - protein, 11 aa, Artificial Sequence
  Synthetic
RASDNLYSNLA

SEQ ID NO: 114 - protein, 7 aa, Artificial Sequence
  Synthetic
DATNLAD

SEQ ID NO: 115 - protein, 9 aa, Artificial Sequence
  Synthetic
QHFWGTPLT

SEQ ID NO: 116 - protein, 7 aa, Artificial Sequence
  Synthetic
GYTFTSY

SEQ ID NO: 117 - protein, 6 aa, Artificial Sequence
  Synthetic
NPTNGR

SEQ ID NO: 118 - protein, 6 aa, Artificial Sequence
  Synthetic
TSYWMH

SEQ ID NO: 119 - protein, 13 aa, Artificial Sequence
  Synthetic
WIGEINPTNGRTN

SEQ ID NO: 120 - protein, 6 aa, Artificial Sequence
  Synthetic
ARGTRA

SEQ ID NO: 121 - protein, 7 aa, Artificial Sequence
  Synthetic
YSNLAWY

SEQ ID NO: 122 - protein, 10 aa, Artificial Sequence
  Synthetic
LLVYDATNLA

SEQ ID NO: 123 - protein, 8 aa, Artificial Sequence
  Synthetic
QHFWGTPL

SEQ ID NO: 124 - protein, 116 aa, Artificial Sequence
  Synthetic
QVQLQQPGAELVKPGASVKLSCKASGYTFTSYWMHWVKQRPGQGLEWIGEINPTNGRTNYIEKFKSKATLTVDKSSSTAYMQLSSLTSEDSAVYYCARGTRAYHYWGQGTSVTVSS

SEQ ID NO: 125 - protein, 107 aa, Artificial Sequence
  Synthetic
DIQMTQSPASLSVSVGETVTITCRASDNLYSNLAWYQQKQGKSPQLLVYDATNLADGVPSRFSGSGSGTQYSLKINSLQSEDFGTYYCQHFWGTPLTFGAGTKLELK

SEQ ID NO: 126 - protein, 9 aa, Artificial Sequence
  Synthetic
QHFAGTPLT

SEQ ID NO: 127 - protein, 8 aa, Artificial Sequence
  Synthetic
QHFAGTPL

SEQ ID NO: 128 - protein, 116 aa, Artificial Sequence
  Synthetic
EVQLVQSGAEVKKPGASVKVSCKASGYTFTSYWMHWVRQAPGQRLEWIGEINPTNGRTNYIEKFKSRATLTVDKSASTAYMELSSLRSEDTAVYYCARGTRAYHYWGQGTMVTVSS

SEQ ID NO: 129 - protein, 107 aa, Artificial Sequence
  Synthetic
DIQMTQSPSSLSASVGDRVTITCRASDNLYSNLAWYQQKPGKSPKLLVYDATNLADGVPSRFSGSGSGTDYTLTISSLQPEDFATYYCQHFWGTPLTFGQGTKVEIK

SEQ ID NO: 130 - protein, 7 aa, Artificial Sequence
  Synthetic
ASSLNIA

SEQ ID NO: 131 - protein, 12 aa, Artificial Sequence
  Synthetic
SKTFNTHPQSTP

SEQ ID NO: 132 - protein, 446 aa, Artificial Sequence
  Synthetic
QVQLQQPGAELVKPGASVKLSCKASGYTFTSYWMHWVKQRPGQGLEWIGEINPTNGRTNYIEKFKSKATLTVDKSSSTAYMQLSSLTSEDSAVYYCARGTRAYHYWGQGTSVTVSSASTKGPSVFPLAPSSKSTSGGTAALGCLVKDYFPEPVTVSWNSGALTSGVHTFPAVLQSSGLYSLSSVVTVPSSSLGTQTYICNVNHKPSNTKVDKKVEPKSCDKTHTCPPCPAPELLGGPSVFLFPPKPKDTLMISRTPEVTCVVVDVSHEDPEVKFNWYVDGVEVHNAKTKPREEQYNSTYRVVSVLTVLHQDWLNGKEYKCKVSNKALPAPIEKTISKAKGQPREPQVYTLPPSRDELTKNQVSLTCLVKGFYPSDIAVEWESNGQPENNYKTTPPVLDSDGSFFLYSKLTVDKSRWQQGNVFSCSVMHEALHNHYTQKSLSLSPGK

SEQ ID NO: 133 - protein, 214 aa, Artificial Sequence
  Synthetic
DIQMTQSPASLSVSVGETVTITCRASDNLYSNLAWYQQKQGKSPQLLVYDATNLADGVPSRFSGSGSGTQYSLKINSLQSEDFGTYYCQHFWGTPLTFGAGTKLELKRTVAAPSVFIFPPSDEQLKSGTASVVCLLNNFYPREAKVQWKVDNALQSGNSQESVTEQDSKDSTYSLSSTLTLSKADYEKHKVYACEVTHQGLSSPVTKSFNRGEC

SEQ ID NO: 134 - protein, 446 aa, Artificial Sequence
  Synthetic
EVQLVQSGAEVKKPGASVKVSCKASGYTFTSYWMHWVRQAPGQRLEWIGEINPTNGRTNYIEKFKSRATLTVDKSASTAYMELSSLRSEDTAVYYCARGTRAYHYWGQGTMVTVSSASTKGPSVFPLAPSSKSTSGGTAALGCLVKDYFPEPVTVSWNSGALTSGVHTFPAVLQSSGLYSLSSVVTVPSSSLGTQTYICNVNHKPSNTKVDKKVEPKSCDKTHTCPPCPAPELLGGPSVFLFPPKPKDTLMISRTPEVTCVVVDVSHEDPEVKFNWYVDGVEVHNAKTKPREEQYNSTYRVVSVLTVLHQDWLNGKEYKCKVSNKALPAPIEKTISKAKGQPREPQVYTLPPSRDELTKNQVSLTCLVKGFYPSDIAVEWESNGQPENNYKTTPPVLDSDGSFFLYSKLTVDKSRWQQGNVFSCSVMHEALHNHYTQKSLSLSPGK

SEQ ID NO: 135 - protein, 214 aa, Artificial Sequence
  Synthetic
DIQMTQSPSSLSASVGDRVTITCRASDNLYSNLAWYQQKPGKSPKLLVYDATNLADGVPSRFSGSGSGTDYTLTISSLQPEDFATYYCQHFWGTPLTFGQGTKVEIKRTVAAPSVFIFPPSDEQLKSGTASVVCLLNNFYPREAKVQWKVDNALQSGNSQESVTEQDSKDSTYSLSSTLTLSKADYEKHKVYACEVTHQGLSSPVTKSFNRGEC

SEQ ID NO: 136 - protein, 226 aa, Artificial Sequence
  Synthetic
QVQLQQPGAELVKPGASVKLSCKASGYTFTSYWMHWVKQRPGQGLEWIGEINPTNGRTNYIEKFKSKATLTVDKSSSTAYMQLSSLTSEDSAVYYCARGTRAYHYWGQGTSVTVSSASTKGPSVFPLAPSSKSTSGGTAALGCLVKDYFPEPVTVSWNSGALTSGVHTFPAVLQSSGLYSLSSVVTVPSSSLGTQTYICNVNHKPSNTKVDKKVEPKSCDKTHTCP

SEQ ID NO: 137 - protein, 226 aa, Artificial Sequence
  Synthetic
EVQLVQSGAEVKKPGASVKVSCKASGYTFTSYWMHWVRQAPGQRLEWIGEINPTNGRTNYIEKFKSRATLTVDKSASTAYMELSSLRSEDTAVYYCARGTRAYHYWGQGTMVTVSSASTKGPSVFPLAPSSKSTSGGTAALGCLVKDYFPEPVTVSWNSGALTSGVHTFPAVLQSSGLYSLSSVVTVPSSSLGTQTYICNVNHKPSNTKVDKKVEPKSCDKTHTCP

SEQ ID NO: 138 - protein, 8 aa, Artificial Sequence
  Synthetic
GYSFTSYW

SEQ ID NO: 139 - protein, 8 aa, Artificial Sequence
  Synthetic
IYPGDSDT

SEQ ID NO: 140 - protein, 15 aa, Artificial Sequence
  Synthetic
ARFPYDSSGYYSFDY

SEQ ID NO: 141 - protein, 6 aa, Artificial Sequence
  Synthetic
QSISSY

SEQ ID NO: 142 - protein, 3 aa, Artificial Sequence
  Synthetic
AAS

SEQ ID NO: 143 - protein, 9 aa, Artificial Sequence
  Synthetic
QQSYSTPLT

SEQ ID NO: 144 - protein, 5 aa, Artificial Sequence
  Synthetic
SYWIG

SEQ ID NO: 145 - protein, 18 aa, Artificial Sequence
  Synthetic
IIYPGDSDTRYSPSFQGQ

SEQ ID NO: 146 - protein, 13 aa, Artificial Sequence
  Synthetic
FPYDSSGYYSFDY

SEQ ID NO: 147 - protein, 11 aa, Artificial Sequence
  Synthetic
RASQSISSYLN

SEQ ID NO: 148 - protein, 7 aa, Artificial Sequence
  Synthetic
AASSLQS

SEQ ID NO: 149 - protein, 7 aa, Artificial Sequence
  Synthetic
GYSFTSY

SEQ ID NO: 150 - protein, 3 aa, Artificial Sequence
  Synthetic
GDS

SEQ ID NO: 151 - protein, 11 aa, Artificial Sequence
  Synthetic
PYDSSGYYSFD

SEQ ID NO: 152 - protein, 7 aa, Artificial Sequence
  Synthetic
SQSISSY

SEQ ID NO: 153 - protein, 6 aa, Artificial Sequence
  Synthetic
SYSTPL

SEQ ID NO: 154 - protein, 122 aa, Artificial Sequence
  Synthetic
QVQLVQSGAEVKKPGESLKISCKGSGYSFTSYWIGWVRQMPGKGLEWMGIIYPGDSDTRYSPSFQGQVTISADKSISTAYLQWSSLKASDTAMYYCARFPYDSSGYYSFDYWGQGTLVTVSS

SEQ ID NO: 155 - protein, 107 aa, Artificial Sequence [sequence omitted]

SEQ ID NO: 156 - protein, 452 aa, Artificial Sequence
  Synthetic
QVQLVQSGAEVKKPGESLKISCKGSGYSFTSYWIGWVRQMPGKGLEWMGIIYPGDSDTRYSPSFQGQVTISADKSISTAYLQWSSLKASDTAMYYCARFPYDSSGYYSFDYWGQGTLVTVSSASTKGPSVFPLAPSSKSTSGGTAALGCLVKDYFPEPVTVSWNSGALTSGVHTFPAVLQSSGLYSLSSVVTVPSSSLGTQTYICNVNHKPSNTKVDKKVEPKSCDKTHTCPPCPAPELLGGPSVFLFPPKPKDTLMISRTPEVTCVVVDVSHEDPEVKFNWYVDGVEVHNAKTKPREEQYNSTYRVVSVLTVLHQDWLNGKEYKCKVSNKALPAPIEKTISKAKGQPREPQVYTLPPSRDELTKNQVSLTCLVKGFYPSDIAVEWESNGQPENNYKTTPPVLDSDGSFFLYSKLTVDKSRWQQGNVFSCSVMHEALHNHYTQKSLSLSPGK

SEQ ID NO: 157 - protein, 214 aa, Artificial Sequence
  Synthetic
DIQMTQSPSSLSASVGDRVTITCRASQSISSYLNWYQQKPGKAPKLLIYAASSLQSGVPSRFSGSGSGTDFTLTISSLQPEDFATYYCQQSYSTPLTFGGGTKVEIKRTVAAPSVFIFPPSDEQLKSGTASVVCLLNNFYPREAKVQWKVDNALQSGNSQESVTEQDSKDSTYSLSSTLTLSKADYEKHKVYACEVTHQGLSSPVTKSFNRGEC

SEQ ID NO: 158 - protein, 232 aa, Artificial Sequence
  Synthetic
QVQLVQSGAEVKKPGESLKISCKGSGYSFTSYWIGWVRQMPGKGLEWMGIIYPGDSDTRYSPSFQGQVTISADKSISTAYLQWSSLKASDTAMYYCARFPYDSSGYYSFDYWGQGTLVTVSSASTKGPSVFPLAPSSKSTSGGTAALGCLVKDYFPEPVTVSWNSGALTSGVHTFPAVLQSSGLYSLSSVVTVPSSSLGTQTYICNVNHKPSNTKVDKKVEPKSCDKTHTCP

SEQ ID NO: 159 - protein, 230 aa, Artificial Sequence
  Synthetic
QVQLVQSGAEVKKPGESLKISCKGSGYSFTSYWIGWVRQMPGKGLEWMGIIYPGDSDTRYSPSFQGQVTISADKSISTAYLQWSSLKASDTAMYYCARFPYDSSGYYSFDYWGQGTLVTVSSASTKGPSVFPLAPSSKSTSGGTAALGCLVKDYFPEPVTVSWNSGALTSGVHTFPAVLQSSGLYSLSSVVTVPSSSLGTQTYICNVNHKPSNTKVDKKVEPKSCDKTHT

SEQ ID NO: 160 - DNA, 3635 bp, Homo sapiens
tcctggcggctgcgaggtttcactgcaggggcgccagtgggctcagtgacgctgcggcctccttctgcctaggtcccaacgcttcggggcaggggtgcggtcttgcaataggaagccgagcgtcttgcaagcttcccgtcgggcaccagctactcggccccgcaccctacctggtgcattccctagacacctccggggtccctacctggagatccccggagccccccttcctgcgccagccatgcctttaaaccgcactttgtccatgtcctcactgccaggactggaggactgggaggatgaattcgacctggagaacgcagtgctcttcgaagtggcctgggaggtggctaacaaggtgggtggcatctacacggtgctgcagacgaaggcgaaggtgacaggggacgaatggggcgacaactacttcctggtggggccgtacacggagcagggcgtgaggacccaggtggaactgctggaggcccccaccccggccctgaagaggacactggattccatgaacagcaagggctgcaaggtgtatttcgggcgctggctgatcgagggaggccctctggtggtgctcctggacgtgggtgcctcagcttgggccctggagcgctggaagggagagctctgggatacctgcaacatcggagtgccgtggtacgaccgcgaggccaacgacgctgtcctctttggctttctgaccacctggttcctgggtgagttcctggcacagagtgaggagaagccacatgtggttgctcacttccatgagtggttggcaggcgttggactctgcctgtgtcgtgcccggcgactgcctgtagcaaccatcttcaccacccatgccacgctgctggggcgctacctgtgtgccggtgccgtggacttctacaacaacctggagaacttcaacgtggacaaggaagcaggggagaggcagatctaccaccgatactgcatggaaagggcggcagcccactgcgctcacgtcttcactactgtgtcccagatcaccgccatcgaggcacagcacttgctcaagaggaaaccagatattgtgacccccaatgggctgaatgtgaagaagttttctgccatgcatgagttccagaacctccatgctcagagcaaggctcgaatccaggagtttgtgcggggccatttttatgggcatctggacttcaacttggacaagaccttatacttctttatcgccggccgctatgagttctccaacaagggtgctgacgtcttcctggaggcattggctcggctcaactatctgctcagagtgaacggcagcgagcagacagtggttgccttcttcatcatgccagcgcggaccaacaatttcaacgtggaaaccctcaaaggccaagctgtgcgcaaacagctttgggacacggccaacacggtgaaggaaaagttcgggaggaagctttatgaatccttactggttgggagccttcccgacatgaacaagatgctggataaggaagacttcactatgatgaagagagccatctttgcaacgcagcggcagtctttcccccctgtgtgcacccacaatatgctggatgactcctcagaccccatcctgaccaccatccgccgaatcggcctcttcaatagcagtgccgacagggtgaaggtgattttccacccggagttcctctcctccacaagccccctgctccctgtggactatgaggagtttgtccgtggctgtcaccttggagtcttcccctcctactatgagccttggggctacacaccggctgagtgcacggttatgggaatccccagtatctccaccaatctctccggcttcggctgcttcatggaggaacacatcgcagacccctcagcttacggtatctacattcttgaccggcggttccgcagcctggatgattcctgctcgcagctcacctccttcctctacagtttctgtcagcagagccggcggcagcgtatcatccagcggaaccgcacggagcgcctctccgaccttctggactggaaatacctaggccggtactatatgtctgcgcgccacatggcgctgtccaaggcctttccagagcacttcacctacgagcccaacgaggcggatgcggcccaggggtaccgctacccacggccagcctcggtgccaccgtcgccctcgctgtcacgacactccagcccgcaccagagtgaggacgaggaggatccccggaacgggccgctggaggaagacggcgagcgctacgatgaggacgaggaggccgccaaggaccggcgcaacatccgtgcaccagagtggccgcgccgagcgtcctgcacctcctccaccagcggcagcaagcgcaactctgtggacacggccacctccagctcactcagcaccccgagcgagcccctcagccccaccagctccctgggcgaggagcgtaactaagtccgccccaccacactccccgcctgtcctgcctctctgctccagagagaggatgcagaggggtgctgctcctaaacccccgctccagatctgcactgggtgtggccccgcagtgcccccacccagtccgccaaacactccaccccctccagctccagtttccaagttcctgcactccagaatccacaaagccgtgcctttctctggctccagaatatgcataatcagcgccctggagtcccctgggcctggaccgcttcccagaggccaggaatctgccattactctgcggtggtgccagaggttttaggaaacctggcatggtgctttcaggtctggggcttttagagccccccgtgtggcttacaaattctacagcatacagagcaggccacgctcaggcccggcatgcgggccaccaagttctggaaaccacgtggtgtccctgcgaatggggcgatcaagtccagagccggggcactttcagagtttgaaggtaactgagagcagatggtcctccatttcaactccagaagtggggctctgggagggatgttctagccctccctggcatgtcagagccaggctctgcctggaggatccctccatccggctcctgtcatcccctacactttggccaagcaagaggtggtagaaccacttggctgctcattccttctggaggacacacagtctcagtccagatgccttcctgtctttctggccctttctggaccagatcctactcttcctttctaaatctgagatctccctccagggaatccgcctgcagaggacagagctggctgtcttcccccacccctaacctggcttattcccaactgctctgcccactgtgaaaccactaggttctaggtcctggcttctagatctggaaccttaccacgttactgcatactgatccctttcccatgatccagaactgaggtcactgggttctagaacccccacatttacctcgaggctcttccatccccaaactgtgccctgccttcagctttggtgaaagggagggcccctcatgtgtgctgtgctgtgtctgcaccgcttggtttgcagttgagaggggagggcaggaggggtgtgattggagtgtgtccggagatgagatgaaaaaaatacatctatatttaagaatcccaaaaaaaaaaaaaaaaaa

SEQ ID NO: 161 - DNA, 3681 bp, Mus musculus
actgcagctgcccgcccgattcagtgtctcagctcaccctacctgagtcggagcgctctggggcgggggtgcggtcgtgcaataggaagcggagcgccttgcaagcttcccctgggacacccgctaactctaccggtcaccaagtctgctgcgttcccagccgatctctctggtttccagttttggtgctcgaagtcccctgcccgcagtagccatgcctctcagccgcagtctctctgtgtcctcgcttccaggattggaagactgggaggatgaattcgaccccgagaacgcagtgcttttcgaggtggcctgggaggtggccaacaaggtgggtggcatctacactgtgctgcagacgaaggcgaaggtgacaggggatgaatggggtgacaactactatctggtgggaccatacacggagcagggtgtgaggacgcaggtagagctcctggagcccccaactccggaactgaagaggactttggattccatgaacagcaagggttgtaaggtgtattttgggcgttggctgatcgaggggggacccctagtggtgctcctggatgtaggagcctcagcttgggccctggagcgctggaagggtgagctttgggacacctgcaacatcggggtaccctggtacgaccgcgaggccaatgacgctgtcctgttcggcttcctcaccacctggttcctgggtgagttcctggcccagaacgaagagaagccgtatgtggttgcccacttccacgaatggttggctggcgttggtctgtgtctgtgccgtgcccggcgcttgccggtggcaaccatcttcaccactcatgccacgctgctggggcgctacctgtgtgctggcgctgtggacttctacaacaacctggagaatttcaatgtagacaaggaagcaggagagaggcagatctatcaccggtactgcatggagcgtgcagcagctcactgtgcccatgtcttcactaccgtatcccagatcaccgcaatcgaggctcaacacctccttaagagaaaaccagatattgtgacccccaacgggctgaatgtgaagaagttctctgctatgcacgaattccagaaccttcatgctcagagcaaagcacgaatccaggaatttgtgcgtggccatttttatgggcacctggacttcaacctagacaagactttgtatttctttatcgctggccgctatgagttttccaacaagggagctgatgtgttcctggaggcattggcccggctcaactatctgctcagagtgaatggcagtgagcaaacagttgtcgcattcttcatcatgccggcccggaccaataatttcaacgtggaaaccctgaagggccaagccgtgcgcaaacaactatgggacacagccaatacagtcaaggagaaatttgggaggaagctctacgaatcccttttagtggggagcctcccggacatgaacaagatgctggacaaggaggacttcactatgatgaagagagccatctttgccactcagcggcagtctttcccaccagtgtgcacccacaacatgctggacgactcctcagaccccatcttgaccaccatccgccgaattggccttttcaacagcagtgccgaccgtgtgaaggtgatttttcacccagaattcctttcttccacaagccctctcctccccgtggattatgaggaatttgtccgcggctgtcaccttggggtcttcccctcctactatgagccctggggctacacaccagcggagtgcactgtcatgggcatccccagcatctccaccaacctctccggctttggctgctttatggaggaacacatcgcagatccctcagcttacggcatttacattctggatcggaggttccgcagcctggatgattcatgctcacagctcacctccttcctgtacagcttctgccagcagagccggcgacagcgcatcatccagcggaaccgcacagaacggttgtcggacttgctagattggaagtacctgggccggtactacatgtctgcgcgccacatggctctggccaaggcctttccagaccacttcacctatgaaccccatgaggtagatgcgacccaggggtaccggtacccacgaccagcctccgtcccgccgtcgccctcactgtctcgacactccagcccacaccagagtgaggatgaggaagagccacgggatggacccctgggggaagacagtgagcgttatgatgaggaagaggaggctgccaaggaccgccgcaacatccgggcacctgagtggccacgcagggcctcctgttcctcctccacaggtggcagcaagagaagcaactcggtggacactgggccctccagctcactcagcacacccactgagcccctgagtcctaccagttccctgggtgaggagcgcaactaagctcccacccccatcccattccctgcctgtccagtgctcctctcgcagagggcctatgcagatgggagggtgcctgaaccccactccagactcttgagtgggacccctacccagtgtggtccatagcctaacctctgtttcagacactccagcccttgagctccaatcttggagttcccgcactccacgccgccgtgcctttcttggattgcaggatgcattctttgtgcactgatctggagtctccaggcttagactgggtcccagaggccaggcatctgccattgtttttcaatgccagaggttttaggacacctggtttattggcttccaggctgtggcttcttcgtttgatcctataatcatacagagtatgctttgctcaggcctgcctctgggaccacctcatgttggattctgtgtggcttcccgaatcagccaagttcagagttaggacatttcagggattaacataattgaaaatcagcctgcaaggtagctcagtagctctgtcgacagattgcttgtctagcatgcccgaagccctgggatctaactctagaacctcataaacctggtgcggtgatacacatctgtaatcccagcactcggtaggtagaggtagacggatcaagagttaaaggccatcatcctctgctacatagggagttcaaggccaaactgggcaacatgagacactgtctcaaaagcaaagtaaaggtggtggaatgctcacggtcctccatttcaacccacgactgcgatgctgggacatgctgcaaggttggcctccctgggtgtgttcttcaaaggagcatgcggagttggaccagacacctttctgccttttttctggaccagaccttcttttccttggtccagtgtcccctctagggaatgcctccattgagggcagaatgtctgtcaaccccacaagtgctcagcccactgtgaaaccactgggttctgggtcccagtggctgaatcaggagtcttttgtcactgtgctgcaccccggtcccctttcctgatacaaaaccgagcccaccggcttcttgaagccccacatgtacctcgaggcctttctgcctgcaagcttcagtgaatgggcgggcccctcctcacgtgtgctgtgtctggcccagtgcctttggtttgcatttgggagggggagggcagaaggtgtgtgattggagtgtgtctagagatgaaaaaaaaaaaaagaaaatacacctgtatttaagaatgcc

SEQ ID NO: 162 - DNA, 19 bp, Artificial Sequence
  Synthetic
actgggaggatgaattcga

SEQ ID NO: 163 - DNA, 19 bp, Artificial Sequence
  Synthetic
ctgggaggatgaattcgac

SEQ ID NO: 164 - DNA, 19 bp, Artificial Sequence
  Synthetic
acaaggtgggtggcatcta

SEQ ID NO: 165 - DNA, 19 bp, Artificial Sequence
  Synthetic
aaggtgggtggcatctaca

SEQ ID NO: 166 - DNA, 19 bp, Artificial Sequence
  Synthetic
gctgcagacgaaggcgaag

SEQ ID NO: 167 - DNA, 19 bp, Artificial Sequence
  Synthetic
tgcagacgaaggcgaaggt

SEQ ID NO: 168 - DNA, 19 bp, Artificial Sequence
  Synthetic
cagacgaaggcgaaggtga

SEQ ID NO: 169 - DNA, 19 bp, Artificial Sequence
  Synthetic
agacgaaggcgaaggtgac

SEQ ID NO: 170 - DNA, 19 bp, Artificial Sequence
  Synthetic
attccatgaacagcaaggg

SEQ ID NO: 171 - DNA, 19 bp, Artificial Sequence
  Synthetic
gacttctacaacaacctgg

SEQ ID NO: 172 - DNA, 19 bp, Artificial Sequence
  Synthetic
ggctcaactatctgctcag

SEQ ID NO: 173 - DNA, 19 bp, Artificial Sequence
  Synthetic
gctcaactatctgctcaga

SEQ ID NO: 174 - DNA, 19 bp, Artificial Sequence
  Synthetic
caactatctgctcagagtg

SEQ ID NO: 175 - DNA, 19 bp, Artificial Sequence
  Synthetic
actatctgctcagagtgaa

SEQ ID NO: 176 - DNA, 19 bp, Artificial Sequence
  Synthetic
gacatgaacaagatgctgg

SEQ ID NO: 177 - DNA, 19 bp, Artificial Sequence
  Synthetic
actatgatgaagagagcca

SEQ ID NO: 178 - DNA, 19 bp, Artificial Sequence
  Synthetic
tgaccaccatccgccgaat

SEQ ID NO: 179 - DNA, 19 bp, Artificial Sequence
  Synthetic
atggaggaacacatcgcag

SEQ ID NO: 180 - DNA, 19 bp, Artificial Sequence
  Synthetic
tggaggaacacatcgcaga

SEQ ID NO: 181 - DNA, 19 bp, Artificial Sequence
  Synthetic
tccgcagcctggatgattc

SEQ ID NO: 182 - DNA, 19 bp, Artificial Sequence
  Synthetic
tgtctgcgcgccacatggc

SEQ ID NO: 183 - DNA, 19 bp, Artificial Sequence
  Synthetic
tcactatgatgaagagagc

SEQ ID NO: 184 - DNA, 19 bp, Artificial Sequence
  Synthetic
ggctgaatgtgaagaagtt

SEQ ID NO: 185 - DNA, 19 bp, Artificial Sequence
  Synthetic
tggattccatgaacagcaa

SEQ ID NO: 186 - DNA, 19 bp, Artificial Sequence
  Synthetic
tctacaacaacctggagaa

SEQ ID NO: 187 - RNA, 21 nt, Artificial Sequence
  Synthetic
ggacugggaggaugaauucga

SEQ ID NO: 188 - RNA, 21 nt, Artificial Sequence
  Synthetic
gacugggaggaugaauucgac

SEQ ID NO: 189 - RNA, 21 nt, Artificial Sequence
  Synthetic
uaacaagguggguggcaucua

SEQ ID NO: 190 - RNA, 21 nt, Artificial Sequence
  Synthetic
acaagguggguggcaucuaca

SEQ ID NO: 191 - RNA, 21 nt, Artificial Sequence
  Synthetic
gugcugcagacgaaggcgaag

SEQ ID NO: 192 - RNA, 21 nt, Artificial Sequence
  Synthetic
gcugcagacgaaggcgaaggu

SEQ ID NO: 193 - RNA, 21 nt, Artificial Sequence
  Synthetic
ugcagacgaaggcgaagguga

SEQ ID NO: 194 - RNA, 21 nt, Artificial Sequence
  Synthetic
gcagacgaaggcgaaggugac

SEQ ID NO: 195 - RNA, 21 nt, Artificial Sequence
  Synthetic
ggauuccaugaacagcaaggg

SEQ ID NO: 196 - RNA, 21 nt, Artificial Sequence
  Synthetic
uggacuucuacaacaaccugg

SEQ ID NO: 197 - RNA, 21 nt, Artificial Sequence
  Synthetic
ucggcucaacuaucugcucag

SEQ ID NO: 198 - RNA, 21 nt, Artificial Sequence
  Synthetic
cggcucaacuaucugcucaga

SEQ ID NO: 199 - RNA, 21 nt, Artificial Sequence
  Synthetic
cucaacuaucugcucagagug

SEQ ID NO: 200 - RNA, 21 nt, Artificial Sequence
  Synthetic
caacuaucugcucagagugaa

SEQ ID NO: 201 - RNA, 21 nt, Artificial Sequence
  Synthetic
ccgacaugaacaagaugcugg

SEQ ID NO: 202 - RNA, 21 nt, Artificial Sequence
  Synthetic
ucacuaugaugaagagagcca

SEQ ID NO: 203 - RNA, 21 nt, Artificial Sequence
  Synthetic
ccugaccaccauccgccgaau

SEQ ID NO: 204 - RNA, 21 nt, Artificial Sequence
  Synthetic
ucauggaggaacacaucgcag

SEQ ID NO: 205 - RNA, 21 nt, Artificial Sequence
  Synthetic
cauggaggaacacaucgcaga

SEQ ID NO: 206 - RNA, 21 nt, Artificial Sequence
  Synthetic
guuccgcagccuggaugauuc

SEQ ID NO: 207 - RNA, 21 nt, Artificial Sequence
  Synthetic
uaugucugcgcgccacauggc

SEQ ID NO: 208 - RNA, 21 nt, Artificial Sequence
  Synthetic
cuucacuaugaugaagagagc

SEQ ID NO: 209 - RNA, 21 nt, Artificial Sequence
  Synthetic
ugggcugaaugugaagaaguu

SEQ ID NO: 210 - RNA, 21 nt, Artificial Sequence
  Synthetic
acuggauuccaugaacagcaa

SEQ ID NO: 211 - RNA, 21 nt, Artificial Sequence
  Synthetic
cuucuacaacaaccuggagaa

SEQ ID NO: 212 - RNA, 23 nt, Artificial Sequence
  Synthetic
ucgaauucauccucccaguccuc

SEQ ID NO: 213 - RNA, 23 nt, Artificial Sequence
  Synthetic
gucgaauucauccucccaguccu

SEQ ID NO: 214 - RNA, 23 nt, Artificial Sequence
  Synthetic
uagaugccacccaccuuguuagc

SEQ ID NO: 215 - RNA, 23 nt, Artificial Sequence
  Synthetic
uguagaugccacccaccuuguua

SEQ ID NO: 216 - RNA, 23 nt, Artificial Sequence
  Synthetic
cuucgccuucgucugcagcaccg

SEQ ID NO: 217 - RNA, 23 nt, Artificial Sequence
  Synthetic
accuucgccuucgucugcagcac

SEQ ID NO: 218 - RNA, 23 nt, Artificial Sequence
  Synthetic
ucaccuucgccuucgucugcagc

SEQ ID NO: 219 - RNA, 23 nt, Artificial Sequence
  Synthetic
gucaccuucgccuucgucugcag

SEQ ID NO: 220 - RNA, 23 nt, Artificial Sequence
  Synthetic
cccuugcuguucauggaauccag

SEQ ID NO: 221 - RNA, 23 nt, Artificial Sequence
  Synthetic
ccagguuguuguagaaguccacg

SEQ ID NO: 222 - RNA, 23 nt, Artificial Sequence
  Synthetic
cugagcagauaguugagccgagc

SEQ ID NO: 223 - RNA, 23 nt, Artificial Sequence
  Synthetic
ucugagcagauaguugagccgag

SEQ ID NO: 224 - RNA, 23 nt, Artificial Sequence
  Synthetic
cacucugagcagauaguugagcc

SEQ ID NO: 225 - RNA, 23 nt, Artificial Sequence
  Synthetic
uucacucugagcagauaguugag

SEQ ID NO: 226 - RNA, 23 nt, Artificial Sequence
  Synthetic
ccagcaucuuguucaugucggga

SEQ ID NO: 227 - RNA, 23 nt, Artificial Sequence
  Synthetic
uggcucucuucaucauagugaag

SEQ ID NO: 228 - RNA, 23 nt, Artificial Sequence
  Synthetic
auucggcggaugguggucaggau

SEQ ID NO: 229 - RNA, 23 nt, Artificial Sequence
  Synthetic
cugcgauguguuccuccaugaag

SEQ ID NO: 230 - RNA, 23 nt, Artificial Sequence
  Synthetic
ucugcgauguguuccuccaugaa

SEQ ID NO: 231 - RNA, 23 nt, Artificial Sequence
  Synthetic
gaaucauccaggcugcggaaccg

SEQ ID NO: 232 - RNA, 23 nt, Artificial Sequence
  Synthetic
gccauguggcgcgcagacauaua

SEQ ID NO: 233 - RNA, 23 nt, Artificial Sequence
  Synthetic
gcucucuucaucauagugaaguc

SEQ ID NO: 234 - RNA, 23 nt, Artificial Sequence
  Synthetic
aacuucuucacauucagcccauu

SEQ ID NO: 235 - RNA, 23 nt, Artificial Sequence
  Synthetic
uugcuguucauggaauccagugu

SEQ ID NO: 236 - RNA, 23 nt, Artificial Sequence
  Synthetic
uucuccagguuguuguagaaguc

SEQ ID NO: 237 - RNA, 21 nt, Artificial Sequence
  Synthetic
  misc_feature (1)..(1): modified by 2'Fluoro
  misc_feature (2)..(2): modified by 2'OMe
  misc_feature (3)..(3): modified by 2'Fluoro
  misc_feature (4)..(4): modified by 2'OMe
  misc_feature (5)..(5): modified by 2'Fluoro
  misc_feature (6)..(6): modified by 2'OMe
  misc_feature (7)..(7): modified by 2'Fluoro
  misc_feature (8)..(8): modified by 2'OMe
  misc_feature (9)..(9): modified by 2'Fluoro
  misc_feature (10)..(10): modified by 2'OMe
  misc_feature (11)..(11): modified by 2'Fluoro
  misc_feature (12)..(12): modified by 2'OMe
  misc_feature (13)..(13): modified by 2'Fluoro
  misc_feature (14)..(14): modified by 2'OMe
  misc_feature (15)..(15): modified by 2'Fluoro
  misc_feature (16)..(16): modified by 2'OMe
  misc_feature (17)..(17): modified by 2'Fluoro
  misc_feature (18)..(18): modified by 2'OMe
  misc_feature (19)..(19): modified by 2'Fluoro
  misc_feature (20)..(20): modified by 2'OMe
  misc_feature (21)..(21): modified by 2'Fluoro
uccuaugacuguagauuuuau

SEQ ID NO: 238 - RNA, 23 nt, Artificial Sequence
  Synthetic
  misc_feature (1)..(1): modified by 2'OMe
  misc_feature (2)..(2): modified by 2'Fluoro
  misc_feature (3)..(3): modified by 2'OMe
  misc_feature (4)..(4): modified by 2'Fluoro
  misc_feature (5)..(5): modified by 2'OMe
  misc_feature (6)..(6): modified by 2'Fluoro
  misc_feature (7)..(7): modified by 2'OMe
  misc_feature (8)..(8): modified by 2'Fluoro
  misc_feature (9)..(9): modified by 2'OMe
  misc_feature (10)..(10): modified by 2'Fluoro
  misc_feature (11)..(11): modified by 2'OMe
  misc_feature (12)..(12): modified by 2'Fluoro
  misc_feature (13)..(13): modified by 2'OMe
  misc_feature (14)..(14): modified by 2'Fluoro
  misc_feature (15)..(15): modified by 2'OMe
  misc_feature (16)..(16): modified by 2'Fluoro
  misc_feature (17)..(17): modified by 2'OMe
  misc_feature (18)..(18): modified by 2'Fluoro
  misc_feature (19)..(19): modified by 2'OMe
  misc_feature (20)..(20): modified by 2'Fluoro
  misc_feature (21)..(21): modified by 2'OMe
  misc_feature (21)..(23): phosphorothioate linkage
  misc_feature (22)..(22): modified by 2'Fluoro
  misc_feature (23)..(23): modified by 2'OMe
auaaaaucuacagucauaggaau

SEQ ID NO: 239 - RNA, 21 nt, Artificial Sequence
  Synthetic
  misc_feature (1)..(1): modified by 2'Fluoro
  misc_feature (2)..(2): modified by 2'OMe
  misc_feature (3)..(3): modified by 2'Fluoro
  misc_feature (4)..(4): modified by 2'OMe
  misc_feature (5)..(5): modified by 2'Fluoro
  misc_feature (6)..(6): modified by 2'OMe
  misc_feature (7)..(7): modified by 2'Fluoro
  misc_feature (8)..(8): modified by 2'OMe
  misc_feature (9)..(9): modified by 2'Fluoro
  misc_feature (10)..(10): modified by 2'OMe
  misc_feature (11)..(11): modified by 2'Fluoro
  misc_feature (12)..(12): modified by 2'OMe
  misc_feature (13)..(13): modified by 2'Fluoro
  misc_feature (14)..(14): modified by 2'OMe
  misc_feature (15)..(15): modified by 2'Fluoro
  misc_feature (16)..(16): modified by 2'OMe
  misc_feature (17)..(17): modified by 2'Fluoro
  misc_feature (18)..(18): modified by 2'OMe
  misc_feature (19)..(19): modified by 2'Fluoro
  misc_feature (20)..(20): modified by 2'OMe
  misc_feature (21)..(21): modified by 2'Fluoro
uguaauaaccauaucuaccuu

SEQ ID NO: 240 - RNA, 23 nt, Artificial Sequence
  Synthetic
  misc_feature (1)..(1): modified by 2'OMe
  misc_feature (2)..(2): modified by 2'Fluoro
  misc_feature (3)..(3): modified by 2'OMe
  misc_feature (4)..(4): modified by 2'Fluoro
  misc_feature (5)..(5): modified by 2'OMe
  misc_feature (6)..(6): modified by 2'Fluoro
  misc_feature (7)..(7): modified by 2'OMe
  misc_feature (8)..(8): modified by 2'Fluoro
  misc_feature (9)..(9): modified by 2'OMe
  misc_feature (10)..(10): modified by 2'Fluoro
  misc_feature (11)..(11): modified by 2'OMe
  misc_feature (12)..(12): modified by 2'Fluoro
  misc_feature (13)..(13): modified by 2'OMe
  misc_feature (14)..(14): modified by 2'Fluoro
  misc_feature (15)..(15): modified by 2'OMe
  misc_feature (16)..(16): modified by 2'Fluoro
  misc_feature (17)..(17): modified by 2'OMe
  misc_feature (18)..(18): modified by 2'Fluoro
  misc_feature (19)..(19): modified by 2'OMe
  misc_feature (20)..(20): modified by 2'Fluoro
  misc_feature (21)..(21): modified by 2'OMe
  misc_feature (21)..(23): phosphorothioate linkage
  misc_feature (22)..(22): modified by 2'Fluoro
  misc_feature (23)..(23): modified by 2'OMe
aagguagauaugguuauuacaaa

SEQ ID NO: 241 - DNA, 3644 bp, Macaca fascicularis
gctggctgcggggtcggccactgcctcctgacggctgcgaggtttcactgcaggggtgccactgggctcagtgacgctgcggccgccttctgcctaggtccgaaggcttcggggcgggggtgcggtcttgcaataggaagctgggcgtcttgcaagcttcccttcgggcgccagctactcggccccgcaccctacctggtgcattccctggacacctccagggtccctaccttgaggtcccccgagcccccttcctgcgccagccatgcctttaaaccgcactttgtccatgtcctcactgccaggactggaggactgggaggatgaattcgacctggagaacacagtgctcttcgaagtggcctgggaggtggccaacaaggtgggtggcatctacacggtgctgcagacgaaggcgaaggtgacgggggacgaatggggcgacaactactacctggtggggccgtacacggagcagggcgtgaggacccaggtggaactgctggaggcccccaccccggccctgaagaagacactggattccatgaacagcaagggttgcaaggtgtattttgggcgctggttgatcgagggaggccctctggtggtgctcctggatgtgggggcctcagcctgggccctggagcgctggaagggagagctctgggatacctgcaacatcggagtgccgtggtacgaccgcgaggccaacgatgctgtcctctttggctttctcactacctggttcctgggtgagttcctcgcgcagagtgaggagaagccacacgtggttgctcacttccatgagtggttggcaggcattggactctgcctgtgtcgtgcccggcgactgcctgtagcaaccatcttcaccacccatgccacgctgctggggcgctacctgtgtgccggtgctgtggacttctacaacaacctggagaacttcaacgtggacaaggaagcaggggagaggcagatctatcaccgctactgcatggaaagggcggcagcccactgtgctcacgtcttcactactgtgtcccagatcaccgccatcgaggcacagcacttgctcaagaggaaaccagatattgtgacccccaatgggctgaatgtgaagaagttttctgccatgcatgagttccagaacctccatgctcagagcaaggctcgaatccaggagtttgtgcggggccatttttatgggcatctggacttcaacttggacaagaccttgtacttctttatcgccggccgctatgagttctccaacaagggtgccgacgtcttcctggaggccttggcccggctcaactatctgctcagagtgaatggcagcgagcagacagtggttgccttcttcatcatgccggcgcggaccaacaatttcaacgtggaaaccctcaaaggccaagccgtgcgcaaacagctttgggacacggccaacacggtgaaggagaagttcgggaggaagctttatgaatccttactggttgggagccttcctgacatgaacaagatgctggataaggaagacttcactatgatgaagagagccatctttgcaacgcagcggcagtctttcccccctgtgtgcacccacaatatgctggatgactcctcagaccccatcctgaccaccatccgccgaatcggcctcttcaatagcagtgccgacagggtgaaggtgattttccacccggagttcctctcctccacaagccccctgctcccggtggactatgaggagtttgtccgtggctgtcaccttggggtcttcccatcctactatgagccttggggctatacgccggctgagtgcacggttatgggcatccccagtatctccaccaatctctccggcttcggctgcttcatggaggaacacatcgcagacccctcagcttacggtatctacattctcgaccggcggttccgcagcctggatgattcctgctcgcagctcacctccttcctctacagcttctgtcagcagagccggcggcagcgtatcatccagcggaaccgcacggagcgcctctccgaccttctggactggaaatacctaggccggtactatatgtctgcgcgccacatggcgctgtccaaggcctttccagagcacttcacctacgagcccagcgaggcagatgcggcccaagggtaccgctacccacggccggcctcggtgccaccgtcgccctcgctgtcacgacactccagcccgcaccagagcgaggacgaggaggatccccggaacgggcctctggaggaagacagcgagcgctacgatgaggacgaggaggccgccaaggaccggcgcaacattcgtgcaccagagtggccgcgccgagcgtcctgcacctcctccaccagtgggagcaagcgcaactctgtggacacggccacctccagctcgctcagcacccccagcgagcccctcagccccaccagctccctgggcgaggagcgtaactaagtcccccccaccacactccctgcctgtcctgcctccctgctccagagagaggatgcagaggggggctgctcctaaacccctgctccagatccgcactgggcgtggccccgcagtgccccccctcagtccgccaaacactccagcccctccagctccactttccaagttcctgcactccagaatccacaaagccgtgcctttctctgattccagagtgcataatccacgccctggaatcccctgggcctggaccgcttcccagaggccaggaatctgccgttactctgcggtggtgccagaggttttaggaaacctggcatggtgctttcaggtctggggctcctagagtccctgtgaggcttgcaaattctacagcacacagagcaggccacgctcgggccgggcatgcgggccaccaagtgctggaaaccacatggtgtccctgcgaatggggcaatcaagtccagagccggggcacttttcagagtttgaaggtaactgagagcagatggtcctccatttcaactccagaactggggctctgggatgggctcatattctagccctccccagcatgtcagagccaggctctgcctggaggatccctccatccggctcctgtcatcccctacgctttggccaagccagaggtggcagaaccacttggccgctcattccttctggaggacacacagtctcggtgcagatgccttcctgcctttctggccttttctggaccagatcctactcctcctttctttatctgagatctccctccagggaatctgcctgcagaggacagagctggctgtctacccccacccctaacctggcttattcccaaccgctcagcccactgcgaaaccactaggttctaggtcctggcttctagatctggaaccttaccacgttgctgcatactagtccctttcccatgatccggaactgaggtcactgggttctagaacccccacatttacctcgaggctcttccatccccaaactgtgccctgccttcagctttggtgaaaaggagggaccctcatgtgtgctgtgctgtgtctgcaccgcttggtttgcagttgggaggggagggcaggaggggtgtgattggagtgtgtccggagatgagatgaaaaaaatacacctatatttaagaatccca

SEQ ID NO: 242 - protein, 10 aa, Artificial Sequence
  Synthetic
GYTFTNYWMH

SEQ ID NO: 243 - protein, 17 aa, Artificial Sequence
  Synthetic
EINPINGRSNYGERFKT

SEQ ID NO: 244 - protein, 7 aa, Artificial Sequence
  Synthetic
GTRAMHY

SEQ ID NO: 245 - protein, 11 aa, Artificial Sequence
  Synthetic
RTSENIYNNLA

SEQ ID NO: 246 - protein, 7 aa, Artificial Sequence
  Synthetic
AATNLAD

SEQ ID NO: 247 - protein, 10 aa, Artificial Sequence
  Synthetic
QHFWGTPLTF

SEQ ID NO: 248 - protein, 116 aa, Artificial Sequence
  Synthetic
QVQLQQPGAELVKPGASVKLSCKASGYTFTNYWMHWVKQRPGQGLEWIGEINPINGRSNYGERFKTKATLTVDKSSSTAYMQLSSLTSEDSAVYYCARGTRAMHYWGQGTSVTVSS

SEQ ID NO: 249 - protein, 107 aa, Artificial Sequence
  Synthetic
DIQMTQSPASLSVSVGETVTITCRTSENIYNNLAWYQQKQGKSPQLLVYAATNLADGVPSRFSGSGSGTQYSLKINSLQSEDFGNYYCQHFWGTPLTFGAGTKLELK

SEQ ID NO: 250 - protein, 9 aa, Artificial Sequence
  Synthetic
YTFTNYWMH

SEQ ID NO: 251 - protein, 17 aa, Artificial Sequence
  Synthetic
EINPINGRSNYAQKFQG

SEQ ID NO: 252 - protein, 17 aa, Artificial Sequence
  Synthetic
EINPINGRSNYAEKFQG

SEQ ID NO: 253 - protein, 17 aa, Artificial Sequence
  Synthetic
EINPIQGRSNYAEKFQG

SEQ ID NO: 254 - protein, 12 aa, Artificial Sequence
  Synthetic
TARGEHKEEELI

SEQ ID NO: 255 - protein, 7 aa, Artificial Sequence
  Synthetic
AATNLAE

SEQ ID NO: 256 - protein, 11 aa, Artificial Sequence
  Synthetic
RTSENIYSNLA

SEQ ID NO: 257 - protein, 7 aa, Artificial Sequence
  Synthetic
AGTNLAD

SEQ ID NO: 258 - protein, 116 aa, Artificial Sequence
  Synthetic
QVQLVQSGAEVKKPGASVKVSCKASGYTFTNYWMHWVRQAPGQGLEWMGEINPINGRSNYAQKFQGRVTLTVDTSISTAYMELSRLRSDDTAVYYCARGTRAMHYWGQGTLVTVSS

SEQ ID NO: 259 - protein, 116 aa, Artificial Sequence
  Synthetic
QVQLVQSGAEVKKPGASVKVSCKASGYTFTNYWMHWVRQAPGQGLEWIGEINPINGRSNYAEKFQGRVTLTVDTSSSTAYMELSRLRSDDTAVYYCARGTRAMHYWGQGTLVTVSS

SEQ ID NO: 260 - protein, 116 aa, Artificial Sequence
  Synthetic
QVQLVQSGAEVKKPGASVKVSCKASGYTFTNYWMHWVRQAPGQGLEWMGEINPIQGRSNYAEKFQGRVTLTVDTSSSTAYMELSSLRSEDTATYYCARGTRAMHYWGQGTLVTVSS

SEQ ID NO: 261 - protein, 116 aa, Artificial Sequence
  Synthetic
QVQLVQSGAEVKKPGASVKVSCKASGYTFTNYWMHWVRQAPGQGLEWMGEINPINGRSNYAEKFQGRVTLTVDTSSSTAYMELSSLRSEDTATYYCARGTRAMHYWGQGTLVTVSS

SEQ ID NO: 262 - protein, 107 aa, Artificial Sequence
  Synthetic
DIQMTQSPSSLSASVGDRVTITCRTSENIYNNLAWYQQKPGKSPKLLIYAATNLADGVPSRFSGSGSGTDYTLTISSLQPEDFATYYCQHFWGTPLTFGGGTKVEIK

SEQ ID NO: 263 - protein, 107 aa, Artificial Sequence
  Synthetic
DIQMTQSPSSLSASVGDRVTITCRTSENIYNNLAWYQQKPGKAPKLLIYAATNLADGVPSRFSGSGSGTDYTLTISSLQPEDFATYYCQHFWGTPLTFGGGTKVEIK

SEQ ID NO: 264 - protein, 107 aa, Artificial Sequence
  Synthetic
DIQMTQSPSSLSASVGDRVTITCRTSENIYNNLAWYQQKPGKAPKLLIYAATNLAEGVPSRFSGSGSGTDYTLTISSLQPEDFATYYCQHFWGTPLTFGGGTKVEIK

SEQ ID NO: 265 - protein, 107 aa, Artificial Sequence
  Synthetic
DIQMTQSPSSLSASVGDRVTITCRTSENIYSNLAWYQQKPGKAPKLLIYAGTNLADGVPSRFSGSGSGTDYTLTISSLQPEDFANYYCQHFWGTPLTFGGGTKVEIK

SEQ ID NO: 266 - RNA, 12 nt, Artificial Sequence
  Synthetic
uccuggcggcug

SEQ ID NO: 267 - RNA, 12 nt, Artificial Sequence
  Synthetic
ccuggcggcugc

SEQ ID NO: 268 - RNA, 12 nt, Artificial Sequence
  Synthetic
cuggcggcugcg

SEQ ID NO: 269 - RNA, 12 nt, Artificial Sequence
  Synthetic
uggcggcugcga

SEQ ID NO: 270 - RNA, 12 nt, Artificial Sequence
  Synthetic
ggcggcugcgag

SEQ ID NO: 271 - RNA, 12 nt, Artificial Sequence
  Synthetic
gcggcugcgagg

SEQ ID NO: 272 - RNA, 12 nt, Artificial Sequence
  Synthetic
cggcugcgaggu

SEQ ID NO: 273 - RNA, 12 nt, Artificial Sequence
  Synthetic
ggcugcgagguu

SEQ ID NO: 274 - RNA, 12 nt, Artificial Sequence
  Synthetic
gcugcgagguuu

SEQ ID NO: 275 - RNA, 12 nt, Artificial Sequence
  Synthetic
cugcgagguuuc

SEQ ID NO: 276 - RNA, 12 nt, Artificial Sequence
  Synthetic
ugcgagguuuca

SEQ ID NO: 277 - RNA, 12 nt, Artificial Sequence
  Synthetic
gcgagguuucac

SEQ ID NO: 278 - RNA, 12 nt, Artificial Sequence
  Synthetic
cgagguuucacu

SEQ ID NO: 279 - RNA, 12 nt, Artificial Sequence
  Synthetic
gagguuucacug

SEQ ID NO: 280 - RNA, 12 nt, Artificial Sequence
  Synthetic
agguuucacugc

SEQ ID NO: 281 - RNA, 12 nt, Artificial Sequence
  Synthetic
gguuucacugca

SEQ ID NO: 282 - RNA, 12 nt, Artificial Sequence
  Synthetic
guuucacugcag

SEQ ID NO: 283 - RNA, 12 nt, Artificial Sequence
  Synthetic
uuucacugcagg

SEQ ID NO: 284 - RNA, 12 nt, Artificial Sequence
  Synthetic
uucacugcaggg

SEQ ID NO: 285 - RNA, 12 nt, Artificial Sequence
  Synthetic
ucacugcagggg

SEQ ID NO: 286 - RNA, 12 nt, Artificial Sequence
  Synthetic
cacugcaggggc

SEQ ID NO: 287 - RNA, 12 nt, Artificial Sequence
  Synthetic
acugcaggggcg

SEQ ID NO: 288 - RNA, 12 nt, Artificial Sequence
  Synthetic
cugcaggggcgc

SEQ ID NO: 289 - RNA, 12 nt, Artificial Sequence
  Synthetic
ugcaggggcgcc

SEQ ID NO: 290 - RNA, 12 nt, Artificial Sequence
  Synthetic
gcaggggcgcca

SEQ ID NO: 291 - RNA, 12 nt, Artificial Sequence
  Synthetic
caggggcgccag

SEQ ID NO: 292 - RNA, 12 nt, Artificial Sequence
  Synthetic
aggggcgccagu

SEQ ID NO: 293 - RNA, 12 nt, Artificial Sequence
  Synthetic
ggggcgccagug

SEQ ID NO: 294 - RNA, 12 nt, Artificial Sequence
  Synthetic
gggcgccagugg

SEQ ID NO: 295 - RNA, 12 nt, Artificial Sequence
  Synthetic
ggcgccaguggg

SEQ ID NO: 296 - RNA, 12 nt, Artificial Sequence
  Synthetic
gcgccagugggc

SEQ ID NO: 297 - RNA, 12 nt, Artificial Sequence
  Synthetic
cgccagugggcu

SEQ ID NO: 298 - RNA, 12 nt, Artificial Sequence
  Synthetic
gccagugggcuc

SEQ ID NO: 299 - RNA, 12 nt, Artificial Sequence
  Synthetic
ccagugggcuca

SEQ ID NO: 300 - RNA, 12 nt, Artificial Sequence
  Synthetic
cagugggcucag

SEQ ID NO: 301 - RNA, 12 nt, Artificial Sequence
  Synthetic
agugggcucagu

SEQ ID NO: 302 - RNA, 12 nt, Artificial Sequence
  Synthetic
gugggcucagug

SEQ ID NO: 303 - RNA, 12 nt, Artificial Sequence
  Synthetic
ugggcucaguga

SEQ ID NO: 304 - RNA, 12 nt, Artificial Sequence
  Synthetic
gggcucagugac

SEQ ID NO: 305 - RNA, 12 nt, Artificial Sequence
  Synthetic
ggcucagugacg

SEQ ID NO: 306 - RNA, 12 nt, Artificial Sequence
  Synthetic
gcucagugacgc

SEQ ID NO: 307 - RNA, 12 nt, Artificial Sequence
  Synthetic
cucagugacgcu

SEQ ID NO: 308 - RNA, 12 nt, Artificial Sequence
  Synthetic
ucagugacgcug

SEQ ID NO: 309 - RNA, 12 nt, Artificial Sequence
  Synthetic
cagugacgcugc

SEQ ID NO: 310 - RNA, 12 nt, Artificial Sequence
  Synthetic
agugacgcugcg

SEQ ID NO: 311 - RNA, 12 nt, Artificial Sequence
  Synthetic
gugacgcugcgg

SEQ ID NO: 312 - RNA, 12 nt, Artificial Sequence
  Synthetic
ugacgcugcggc

SEQ ID NO: 313 - RNA, 12 nt, Artificial Sequence
  Synthetic
gacgcugcggcc

SEQ ID NO: 314 - RNA, 12 nt, Artificial Sequence
  Synthetic
acgcugcggccu

SEQ ID NO: 315 - RNA, 12 nt, Artificial Sequence
  Synthetic
cgcugcggccuc

SEQ ID NO: 316 - RNA, 12 nt, Artificial Sequence
  Synthetic
gcugcggccucc

SEQ ID NO: 317 - RNA, 12 nt, Artificial Sequence
  Synthetic
cugcggccuccu

SEQ ID NO: 318 - RNA, 12 nt, Artificial Sequence
  Synthetic
ugcggccuccuu

SEQ ID NO: 319 - RNA, 12 nt, Artificial Sequence
  Synthetic
gcggccuccuuc

SEQ ID NO: 320 - RNA, 12 nt, Artificial Sequence
  Synthetic
cggccuccuucu

SEQ ID NO: 321 - RNA, 12 nt, Artificial Sequence
  Synthetic
ggccuccuucug

SEQ ID NO: 322 - RNA, 12 nt, Artificial Sequence
  Synthetic
gccuccuucugc

SEQ ID NO: 323 - RNA, 12 nt, Artificial Sequence
  Synthetic
ccuccuucugcc

SEQ ID NO: 324 - RNA, 12 nt, Artificial Sequence
  Synthetic
cuccuucugccu

SEQ ID NO: 325 - RNA, 12 nt, Artificial Sequence
  Synthetic
uccuucugccua

SEQ ID NO: 326 - RNA, 12 nt, Artificial Sequence
  Synthetic
ccuucugccuag

SEQ ID NO: 327 - RNA, 12 nt, Artificial Sequence
  Synthetic
cuucugccuagg

SEQ ID NO: 328 - RNA, 12 nt, Artificial Sequence
  Synthetic
uucugccuaggu

SEQ ID NO: 329 - RNA, 12 nt, Artificial Sequence
  Synthetic
ucugccuagguc

SEQ ID NO: 330 - RNA, 12 nt, Artificial Sequence
  Synthetic
cugccuaggucc

SEQ ID NO: 331 - RNA, 12 nt, Artificial Sequence
  Synthetic
ugccuagguccc

SEQ ID NO: 332 - RNA, 12 nt, Artificial Sequence
  Synthetic
gccuagguccca

SEQ ID NO: 333 - RNA, 12 nt, Artificial Sequence
  Synthetic
ccuaggucccaa

SEQ ID NO: 334 - RNA, 12 nt, Artificial Sequence
  Synthetic
cuaggucccaac

SEQ ID NO: 335 - RNA, 12 nt, Artificial Sequence
  Synthetic
uaggucccaacg

SEQ ID NO: 336 - RNA, 12 nt, Artificial Sequence
  Synthetic
aggucccaacgc

SEQ ID NO: 337 - RNA, 12 nt, Artificial Sequence
  Synthetic
ggucccaacgcu

SEQ ID NO: 338 - RNA, 12 nt, Artificial Sequence
  Synthetic
gucccaacgcuu

SEQ ID NO: 339 - RNA, 12 nt, Artificial Sequence
  Synthetic
ucccaacgcuuc

SEQ ID NO: 340 - RNA, 12 nt, Artificial Sequence
  Synthetic
cccaacgcuucg

SEQ ID NO: 341 - RNA, 12 nt, Artificial Sequence
  Synthetic
ccaacgcuucgg

SEQ ID NO: 342 - RNA, 12 nt, Artificial Sequence
  Synthetic
caacgcuucggg

SEQ ID NO: 343 - RNA, 12 nt, Artificial Sequence
  Synthetic
aacgcuucgggg

SEQ ID NO: 344 - RNA, 12 nt, Artificial Sequence
  Synthetic
acgcuucggggc

SEQ ID NO: 345 - RNA, 12 nt, Artificial Sequence
  Synthetic
cgcuucggggca

SEQ ID NO: 346 - RNA, 12 nt, Artificial Sequence
  Synthetic
gcuucggggcag

SEQ ID NO: 347 - RNA, 12 nt, Artificial Sequence
  Synthetic
cuucggggcagg

SEQ ID NO: 348 - RNA, 12 nt, Artificial Sequence
  Synthetic
uucggggcaggg

SEQ ID NO: 349 - RNA, 12 nt, Artificial Sequence
  Synthetic
ucggggcagggg

SEQ ID NO: 350 - RNA, 12 nt, Artificial Sequence
  Synthetic
cggggcaggggu

SEQ ID NO: 351 - RNA, 12 nt, Artificial Sequence
  Synthetic
ggggcaggggug

SEQ ID NO: 352 - RNA, 12 nt, Artificial Sequence
  Synthetic
gggcaggggugc

SEQ ID NO: 353 - RNA, 12 nt, Artificial Sequence
  Synthetic
ggcaggggugcg

SEQ ID NO: 354 - RNA, 12 nt, Artificial Sequence
  Synthetic
gcaggggugcgg

SEQ ID NO: 355 - RNA, 12 nt, Artificial Sequence
  Synthetic
caggggugcggu

SEQ ID NO: 356 - RNA, 12 nt, Artificial Sequence
  Synthetic
aggggugcgguc

SEQ ID NO: 357 - RNA, 12 nt, Artificial Sequence
  Synthetic
ggggugcggucu

SEQ ID NO: 358 - RNA, 12 nt, Artificial Sequence
  Synthetic
gggugcggucuu

SEQ ID NO: 359 - RNA, 12 nt, Artificial Sequence
  Synthetic
ggugcggucuug

SEQ ID NO: 360 - RNA, 12 nt, Artificial Sequence
  Synthetic
gugcggucuugc

SEQ ID NO: 361 - RNA, 12 nt, Artificial Sequence
  Synthetic
ugcggucuugca

SEQ ID NO: 362 - RNA, 12 nt, Artificial Sequence
  Synthetic
gcggucuugcaa

SEQ ID NO: 363 - RNA, 12 nt, Artificial Sequence
  Synthetic
cggucuugcaau

SEQ ID NO: 364 - RNA, 12 nt, Artificial Sequence
  Synthetic
ggucuugcaaua

SEQ ID NO: 365 - RNA, 12 nt, Artificial Sequence
  Synthetic
gucuugcaauag

SEQ ID NO: 366 - RNA, 12 nt, Artificial Sequence
  Synthetic
ucuugcaauagg

SEQ ID NO: 367 - RNA, 12 nt, Artificial Sequence
  Synthetic
cuugcaauagga

SEQ ID NO: 368 - RNA, 12 nt, Artificial Sequence
  Synthetic
uugcaauaggaa

SEQ ID NO: 369 - RNA, 12 nt, Artificial Sequence
  Synthetic
ugcaauaggaag

SEQ ID NO: 370 - RNA, 12 nt, Artificial Sequence
  Synthetic
gcaauaggaagc

SEQ ID NO: 371 - RNA, 12 nt, Artificial Sequence
  Synthetic
caauaggaagcc

SEQ ID NO: 372 - RNA, 12 nt, Artificial Sequence
  Synthetic
aauaggaagccg

SEQ ID NO: 373 - RNA, 12 nt, Artificial Sequence
  Synthetic
auaggaagccga

SEQ ID NO: 374 - RNA, 12 nt, Artificial Sequence
  Synthetic
uaggaagccgag

SEQ ID NO: 375 - RNA, 12 nt, Artificial Sequence
  Synthetic
aggaagccgagc

SEQ ID NO: 376 - RNA, 12 nt, Artificial Sequence
  Synthetic
ggaagccgagcg

SEQ ID NO: 377 - RNA, 12 nt, Artificial Sequence
  Synthetic
gaagccgagcgu

SEQ ID NO: 378 - RNA, 12 nt, Artificial Sequence
  Synthetic
aagccgagcguc

SEQ ID NO: 379 - RNA, 12 nt, Artificial Sequence
  Synthetic
agccgagcgucu

SEQ ID NO: 380 - RNA, 12 nt, Artificial Sequence
  Synthetic
gccgagcgucuu

SEQ ID NO: 381 - RNA, 12 nt, Artificial Sequence
  Synthetic
ccgagcgucuug

SEQ ID NO: 382 - RNA, 12 nt, Artificial Sequence
  Synthetic
cgagcgucuugc

SEQ ID NO: 383 - RNA, 12 nt, Artificial Sequence
  Synthetic
gagcgucuugca

SEQ ID NO: 384 - RNA, 12 nt, Artificial Sequence
  Synthetic
agcgucuugcaa

SEQ ID NO: 385 - RNA, 12 nt, Artificial Sequence
  Synthetic
gcgucuugcaag

SEQ ID NO: 386 - RNA, 12 nt, Artificial Sequence
  Synthetic
cgucuugcaagc

SEQ ID NO: 387 - RNA, 12 nt, Artificial Sequence
  Synthetic
gucuugcaagcu

SEQ ID NO: 388 - RNA, 12 nt, Artificial Sequence
  Synthetic
ucuugcaagcuu

SEQ ID NO: 389 - RNA, 12 nt, Artificial Sequence
  Synthetic
cuugcaagcuuc

SEQ ID NO: 390 - RNA, 12 nt, Artificial Sequence
  Synthetic
uugcaagcuucc

SEQ ID NO: 391 - RNA, 12 nt, Artificial Sequence
  Synthetic
ugcaagcuuccc

SEQ ID NO: 392 - RNA, 12 nt, Artificial Sequence
  Synthetic
gcaagcuucccg

SEQ ID NO: 393 - RNA, 12 nt, Artificial Sequence
  Synthetic
caagcuucccgu

SEQ ID NO: 394 - RNA, 12 nt, Artificial Sequence
  Synthetic
aagcuucccguc

SEQ ID NO: 395 - RNA, 12 nt, Artificial Sequence
  Synthetic
agcuucccgucg

SEQ ID NO: 396 - RNA, 12 nt, Artificial Sequence
  Synthetic
gcuucccgucgg

SEQ ID NO: 397 - RNA, 12 nt, Artificial Sequence
  Synthetic
cuucccgucggg

SEQ ID NO: 398 - RNA, 12 nt, Artificial Sequence
  Synthetic
uucccgucgggc

SEQ ID NO: 399 - RNA, 12 nt, Artificial Sequence
  Synthetic
ucccgucgggca

SEQ ID NO: 400 - RNA, 12 nt, Artificial Sequence
  Synthetic
cccgucgggcac

SEQ ID NO: 401 - RNA, 12 nt, Artificial Sequence
  Synthetic
ccgucgggcacc

SEQ ID NO: 402 - RNA, 12 nt, Artificial Sequence
  Synthetic
cgucgggcacca

SEQ ID NO: 403 - RNA, 12 nt, Artificial Sequence
  Synthetic
gucgggcaccag

SEQ ID NO: 404 - RNA, 12 nt, Artificial Sequence
  Synthetic
ucgggcaccagc

SEQ ID NO: 405 - RNA, 12 nt, Artificial Sequence
  Synthetic
cgggcaccagcu

SEQ ID NO: 406 - RNA, 12 nt, Artificial Sequence
  Synthetic
gggcaccagcua

SEQ ID NO: 407 - RNA, 12 nt, Artificial Sequence
  Synthetic
ggcaccagcuac

SEQ ID NO: 408 - RNA, 12 nt, Artificial Sequence
  Synthetic
gcaccagcuacu

SEQ ID NO: 409 - RNA, 12 nt, Artificial Sequence
  Synthetic
caccagcuacuc

SEQ ID NO: 410 - RNA, 12 nt, Artificial Sequence
  Synthetic
accagcuacucg

SEQ ID NO: 411 - RNA, 12 nt, Artificial Sequence
  Synthetic
ccagcuacucgg

SEQ ID NO: 412 - RNA, 12 nt, Artificial Sequence
  Synthetic
cagcuacucggc

SEQ ID NO: 413 - RNA, 12 nt, Artificial Sequence
  Synthetic
agcuacucggcc

SEQ ID NO: 414 - RNA, 12 nt, Artificial Sequence
  Synthetic
gcuacucggccc

SEQ ID NO: 415 - RNA, 12 nt, Artificial Sequence
  Synthetic
cuacucggcccc

SEQ ID NO: 416 - RNA, 12 nt, Artificial Sequence
  Synthetic
uacucggccccg

SEQ ID NO: 417 - RNA, 12 nt, Artificial Sequence
  Synthetic
acucggccccgc

SEQ ID NO: 418 - RNA, 12 nt, Artificial Sequence
  Synthetic
cucggccccgca

SEQ ID NO: 419 - RNA, 12 nt, Artificial Sequence
  Synthetic
ucggccccgcac

SEQ ID NO: 420 - RNA, 12 nt, Artificial Sequence
  Synthetic
cggccccgcacc

SEQ ID NO: 421 - RNA, 12 nt, Artificial Sequence
  Synthetic
ggccccgcaccc

SEQ ID NO: 422 - RNA, 12 nt, Artificial Sequence
  Synthetic
gccccgcacccu

SEQ ID NO: 423 - RNA, 12 nt, Artificial Sequence
  Synthetic
ccccgcacccua

SEQ ID NO: 424 - RNA, 12 nt, Artificial Sequence
  Synthetic
cccgcacccuac

SEQ ID NO: 425 - RNA, 12 nt, Artificial Sequence
  Synthetic
ccgcacccuacc

SEQ ID NO: 426 - RNA, 12 nt, Artificial Sequence
  Synthetic
cgcacccuaccu

SEQ ID NO: 427 - RNA, 12 nt, Artificial Sequence
  Synthetic
gcacccuaccug

SEQ ID NO: 428 - RNA, 12 nt, Artificial Sequence
  Synthetic
cacccuaccugg

SEQ ID NO: 429 - RNA, 12 nt, Artificial Sequence
  Synthetic
acccuaccuggu

SEQ ID NO: 430 - RNA, 12 nt, Artificial Sequence
  Synthetic
cccuaccuggug

SEQ ID NO: 431 - RNA, 12 nt, Artificial Sequence
  Synthetic
ccuaccuggugc

SEQ ID NO: 432 - RNA, 12 nt, Artificial Sequence
  Synthetic
cuaccuggugca

SEQ ID NO: 433 - RNA, 12 nt, Artificial Sequence
  Synthetic
uaccuggugcau

SEQ ID NO: 434 - RNA, 12 nt, Artificial Sequence
  Synthetic
accuggugcauu

SEQ ID NO: 435 - RNA, 12 nt, Artificial Sequence
  Synthetic
ccuggugcauuc

SEQ ID NO: 436 - RNA, 12 nt, Artificial Sequence
  Synthetic
cuggugcauucc

SEQ ID NO: 437 - RNA, 12 nt, Artificial Sequence
  Synthetic
uggugcauuccc

SEQ ID NO: 438 - RNA, 12 nt, Artificial Sequence
  Synthetic
ggugcauucccu

SEQ ID NO: 439 - RNA, 12 nt, Artificial Sequence
  Synthetic
gugcauucccua

SEQ ID NO: 440 - RNA, 12 nt, Artificial Sequence
  Synthetic
ugcauucccuag

SEQ ID NO: 441 - RNA, 12 nt, Artificial Sequence
  Synthetic
gcauucccuaga

SEQ ID NO: 442 - RNA, 12 nt, Artificial Sequence
  Synthetic
cauucccuagac

SEQ ID NO: 443 - RNA, 12 nt, Artificial Sequence
  Synthetic
auucccuagaca

SEQ ID NO: 444 - RNA, 12 nt, Artificial Sequence
  Synthetic
uucccuagacac

SEQ ID NO: 445 - RNA, 12 nt, Artificial Sequence
  Synthetic
ucccuagacacc

SEQ ID NO: 446 - RNA, 12 nt, Artificial Sequence
  Synthetic
cccuagacaccu

SEQ ID NO: 447 - RNA, 12 nt, Artificial Sequence
  Synthetic
ccuagacaccuc

SEQ ID NO: 448 - RNA, 12 nt, Artificial Sequence
  Synthetic
cuagacaccucc

SEQ ID NO: 449 - RNA, 12 nt, Artificial Sequence
  Synthetic
uagacaccuccg

SEQ ID NO: 450 - RNA, 12 nt, Artificial Sequence
  Synthetic
agacaccuccgg

SEQ ID NO: 451 - RNA, 12 nt, Artificial Sequence
  Synthetic
gacaccuccggg

SEQ ID NO: 452 - RNA, 12 nt, Artificial Sequence
  Synthetic
acaccuccgggg

SEQ ID NO: 453 - RNA, 12 nt, Artificial Sequence
  Synthetic
caccuccggggu

SEQ ID NO: 454 - RNA, 12 nt, Artificial Sequence
  Synthetic
accuccgggguc

SEQ ID NO: 455 - RNA, 12 nt, Artificial Sequence
  Synthetic
ccuccggggucc

SEQ ID NO: 456 - RNA, 12 nt, Artificial Sequence
  Synthetic
cuccgggguccc

SEQ ID NO: 457 - RNA, 12 nt, Artificial Sequence
  Synthetic
uccggggucccu

SEQ ID NO: 458 - RNA, 12 nt, Artificial Sequence
  Synthetic
ccggggucccua

SEQ ID NO: 459 - RNA, 12 nt, Artificial Sequence
  Synthetic
cggggucccuac

SEQ ID NO: 460 - RNA, 12 nt, Artificial Sequence
  Synthetic
ggggucccuacc

SEQ ID NO: 461 - RNA, 12 nt, Artificial Sequence
  Synthetic
gggucccuaccu

SEQ ID NO: 462 - RNA, 12 nt, Artificial Sequence
  Synthetic
ggucccuaccug

SEQ ID NO: 463 - RNA, 12 nt, Artificial Sequence
  Synthetic
gucccuaccugg

SEQ ID NO: 464 - RNA, 12 nt, Artificial Sequence
  Synthetic
ucccuaccugga

SEQ ID NO: 465 - RNA, 12 nt, Artificial Sequence
  Synthetic
cccuaccuggag

SEQ ID NO: 466 - RNA, 12 nt, Artificial Sequence
  Synthetic
ccuaccuggaga

SEQ ID NO: 467 - RNA, 12 nt, Artificial Sequence
  Synthetic
cuaccuggagau

SEQ ID NO: 468 - RNA, 12 nt, Artificial Sequence
  Synthetic
uaccuggagauc

SEQ ID NO: 469 - RNA, 12 nt, Artificial Sequence
  Synthetic
accuggagaucc

SEQ ID NO: 470 - RNA, 12 nt, Artificial Sequence
  Synthetic
ccuggagauccc

SEQ ID NO: 471 - RNA, 12 nt, Artificial Sequence
  Synthetic
cuggagaucccc

SEQ ID NO: 472 - RNA, 12 nt, Artificial Sequence
  Synthetic
uggagauccccg

SEQ ID NO: 473 - RNA, 12 nt, Artificial Sequence
  Synthetic
ggagauccccgg

SEQ ID NO: 474 - RNA, 12 nt, Artificial Sequence
  Synthetic
gagauccccgga

SEQ ID NO: 475 - RNA, 12 nt, Artificial Sequence
  Synthetic
agauccccggag

SEQ ID NO: 476 - RNA, 12 nt, Artificial Sequence
  Synthetic
gauccccggagc

SEQ ID NO: 477 - RNA, 12 nt, Artificial Sequence
  Synthetic
auccccggagcc

SEQ ID NO: 478 - RNA, 12 nt, Artificial Sequence
  Synthetic
uccccggagccc

SEQ ID NO: 479 - RNA, 12 nt, Artificial Sequence
  Synthetic
ccccggagcccc

SEQ ID NO: 480 - RNA, 12 nt, Artificial Sequence
  Synthetic
cccggagccccc

SEQ ID NO: 481 - RNA, 12 nt, Artificial Sequence
  Synthetic
ccggagcccccc

SEQ ID NO: 482 - RNA, 12 nt, Artificial Sequence
  Synthetic
cggagccccccu

SEQ ID NO: 483 - RNA, 12 nt, Artificial Sequence
  Synthetic
ggagccccccuu

SEQ ID NO: 484 - RNA, 12 nt, Artificial Sequence
  Synthetic
gagccccccuuc

SEQ ID NO: 485 - RNA, 12 nt, Artificial Sequence
  Synthetic
agccccccuucc

SEQ ID NO: 486 - RNA, 12 nt, Artificial Sequence
  Synthetic
gccccccuuccu

SEQ ID NO: 487 - RNA, 12 nt, Artificial Sequence
  Synthetic
ccccccuuccug

SEQ ID NO: 488 - RNA, 12 nt, Artificial Sequence
  Synthetic
cccccuuccugc

SEQ ID NO: 489 - RNA, 12 nt, Artificial Sequence
  Synthetic
ccccuuccugcg

SEQ ID NO: 490 - RNA, 12 nt, Artificial Sequence
  Synthetic
cccuuccugcgc

SEQ ID NO: 491 - RNA, 12 nt, Artificial Sequence
  Synthetic
ccuuccugcgcc

SEQ ID NO: 492 - RNA, 12 nt, Artificial Sequence
  Synthetic
cuuccugcgcca

SEQ ID NO: 493 - RNA, 12 nt, Artificial Sequence
  Synthetic
uuccugcgccag

SEQ ID NO: 494 - RNA, 12 nt, Artificial Sequence
  Synthetic
uccugcgccagc

SEQ ID NO: 495 - RNA, 12 nt, Artificial Sequence
  Synthetic
ccugcgccagcc

SEQ ID NO: 496 - RNA, 12 nt, Artificial Sequence
  Synthetic
cugcgccagcca

SEQ ID NO: 497 - RNA, 12 nt, Artificial Sequence
  Synthetic
ugcgccagccau

SEQ ID NO: 498 - RNA, 12 nt, Artificial Sequence
  Synthetic
gcgccagccaug

SEQ ID NO: 499 - RNA, 12 nt, Artificial Sequence
  Synthetic
cgccagccaugc

SEQ ID NO: 500 - RNA, 12 nt, Artificial Sequence
  Synthetic
gccagccaugcc

SEQ ID NO: 501 - RNA, 12 nt, Artificial Sequence
  Synthetic
ccagccaugccu

SEQ ID NO: 502 - RNA, 12 nt, Artificial Sequence
  Synthetic
cagccaugccuu

SEQ ID NO: 503 - RNA, 12 nt, Artificial Sequence
  Synthetic
agccaugccuuu

SEQ ID NO: 504 - RNA, 12 nt, Artificial Sequence
  Synthetic
gccaugccuuua

SEQ ID NO: 505 - RNA, 12 nt, Artificial Sequence
  Synthetic
ccaugccuuuaa

SEQ ID NO: 506 - RNA, 12 nt, Artificial Sequence
  Synthetic
caugccuuuaaa

SEQ ID NO: 507 - RNA, 12 nt, Artificial Sequence
  Synthetic
augccuuuaaac

SEQ ID NO: 508 - RNA, 12 nt, Artificial Sequence
  Synthetic
ugccuuuaaacc

SEQ ID NO: 509 - RNA, 12 nt, Artificial Sequence
  Synthetic
gccuuuaaaccg

SEQ ID NO: 510 - RNA, 12 nt, Artificial Sequence
  Synthetic
ccuuuaaaccgc

SEQ ID NO: 511 - RNA, 12 nt, Artificial Sequence
  Synthetic
cuuuaaaccgca

SEQ ID NO: 512 - RNA, 12 nt, Artificial Sequence
  Synthetic
uuuaaaccgcac

SEQ ID NO: 513 - RNA, 12 nt, Artificial Sequence
  Synthetic
uuaaaccgcacu

SEQ ID NO: 514 - RNA, 12 nt, Artificial Sequence
  Synthetic
uaaaccgcacuu

SEQ ID NO: 515 - RNA, 12 nt, Artificial Sequence
  Synthetic
aaaccgcacuuu

SEQ ID NO: 516 - RNA, 12 nt, Artificial Sequence
  Synthetic
aaccgcacuuug

SEQ ID NO: 517 - RNA, 12 nt, Artificial Sequence
  Synthetic
accgcacuuugu

SEQ ID NO: 518 - RNA, 12 nt, Artificial Sequence
  Synthetic
ccgcacuuuguc

SEQ ID NO: 519 - RNA, 12 nt, Artificial Sequence
  Synthetic
cgcacuuugucc

SEQ ID NO: 520 - RNA, 12 nt, Artificial Sequence
  Synthetic
gcacuuugucca

SEQ ID NO: 521 - RNA, 12 nt, Artificial Sequence
  Synthetic
cacuuuguccau

SEQ ID NO: 522 - RNA, 12 nt, Artificial Sequence
  Synthetic
acuuuguccaug

SEQ ID NO: 523 - RNA, 12 nt, Artificial Sequence
  Synthetic
cuuuguccaugu

SEQ ID NO: 524 - RNA, 12 nt, Artificial Sequence
  Synthetic
uuuguccauguc

SEQ ID NO: 525 - RNA, 12 nt, Artificial Sequence
  Synthetic
uuguccaugucc

SEQ ID NO: 526 - RNA, 12 nt, Artificial Sequence
  Synthetic
uguccauguccu

SEQ ID NO: 527 - RNA, 12 nt, Artificial Sequence
  Synthetic
guccauguccuc

SEQ ID NO: 528 - RNA, 12 nt, Artificial Sequence
  Synthetic
uccauguccuca

SEQ ID NO: 529 - RNA, 12 nt, Artificial Sequence
  Synthetic
ccauguccucac

SEQ ID NO: 530 - RNA, 12 nt, Artificial Sequence
  Synthetic
cauguccucacu

SEQ ID NO: 531 - RNA, 12 nt, Artificial Sequence
  Synthetic
auguccucacug

SEQ ID NO: 532 - RNA, 12 nt, Artificial Sequence
  Synthetic
uguccucacugc

SEQ ID NO: 533 - RNA, 12 nt, Artificial Sequence
  Synthetic
guccucacugcc

SEQ ID NO: 534 - RNA, 12 nt, Artificial Sequence
  Synthetic
uccucacugcca

SEQ ID NO: 535 - RNA, 12 nt, Artificial Sequence
  Synthetic
ccucacugccag

SEQ ID NO: 536 - RNA, 12 nt, Artificial Sequence
  Synthetic
cucacugccagg

SEQ ID NO: 537 - RNA, 12 nt, Artificial Sequence
  Synthetic
ucacugccagga

SEQ ID NO: 538 - RNA, 12 nt, Artificial Sequence
  Synthetic
cacugccaggac

SEQ ID NO: 539 - RNA, 12 nt, Artificial Sequence
  Synthetic
acugccaggacu

SEQ ID NO: 540 - RNA, 12 nt, Artificial Sequence
  Synthetic
cugccaggacug

SEQ ID NO: 541 - RNA, 12 nt, Artificial Sequence
  Synthetic
ugccaggacugg

SEQ ID NO: 542 - RNA, 12 nt, Artificial Sequence
  Synthetic
gccaggacugga

SEQ ID NO: 543 - RNA, 12 nt, Artificial Sequence
  Synthetic
ccaggacuggag

SEQ ID NO: 544 - RNA, 12 nt, Artificial Sequence
  Synthetic
caggacuggagg

SEQ ID NO: 545 - RNA, 12 nt, Artificial Sequence
  Synthetic
aggacuggagga

SEQ ID NO: 546 - RNA, 12 nt, Artificial Sequence
  Synthetic
ggacuggaggac

SEQ ID NO: 547 - RNA, 12 nt, Artificial Sequence
  Synthetic
gacuggaggacu

SEQ ID NO: 548 - RNA, 12 nt, Artificial Sequence
  Synthetic
acuggaggacug

SEQ ID NO: 549 - RNA, 12 nt, Artificial Sequence
  Synthetic
cuggaggacugg

SEQ ID NO: 550 - RNA, 12 nt, Artificial Sequence
  Synthetic
uggaggacuggg

SEQ ID NO: 551 - RNA, 12 nt, Artificial Sequence
  Synthetic
ggaggacuggga

SEQ ID NO: 552 - RNA, 12 nt, Artificial Sequence
  Synthetic
gaggacugggag

SEQ ID NO: 553 - RNA, 12 nt, Artificial Sequence
  Synthetic
aggacugggagg

SEQ ID NO: 554 - RNA, 12 nt, Artificial Sequence
  Synthetic
ggacugggagga

SEQ ID NO: 555 - RNA, 12 nt, Artificial Sequence
  Synthetic
gacugggaggau

SEQ ID NO: 556 - RNA, 12 nt, Artificial Sequence
  Synthetic
acugggaggaug

SEQ ID NO: 557 - RNA, 12 nt, Artificial Sequence
  Synthetic
cugggaggauga

SEQ ID NO: 558 - RNA, 12 nt, Artificial Sequence
  Synthetic
ugggaggaugaa

SEQ ID NO: 559 - RNA, 12 nt, Artificial Sequence
  Synthetic
gggaggaugaau

SEQ ID NO: 560 - RNA, 12 nt, Artificial Sequence
  Synthetic
ggaggaugaauu

SEQ ID NO: 561 - RNA, 12 nt, Artificial Sequence
  Synthetic
gaggaugaauuc

SEQ ID NO: 562 - RNA, 12 nt, Artificial Sequence
  Synthetic
aggaugaauucg

SEQ ID NO: 563 - RNA, 12 nt, Artificial Sequence
  Synthetic
ggaugaauucga

SEQ ID NO: 564 - RNA, 12 nt, Artificial Sequence
  Synthetic
gaugaauucgac

SEQ ID NO: 565 - RNA, 12 nt, Artificial Sequence
  Synthetic
augaauucgacc

SEQ ID NO: 566 - RNA, 12 nt, Artificial Sequence
  Synthetic
ugaauucgaccu

SEQ ID NO: 567 - RNA, 12 nt, Artificial Sequence
  Synthetic
gaauucgaccug

SEQ ID NO: 568 - RNA, 12 nt, Artificial Sequence
  Synthetic
aauucgaccugg

SEQ ID NO: 569 - RNA, 12 nt, Artificial Sequence
  Synthetic
auucgaccugga

SEQ ID NO: 570 - RNA, 12 nt, Artificial Sequence
  Synthetic
uucgaccuggag

SEQ ID NO: 571 - RNA, 12 nt, Artificial Sequence
  Synthetic
ucgaccuggaga

SEQ ID NO: 572 - RNA, 12 nt, Artificial Sequence
  Synthetic
cgaccuggagaa

SEQ ID NO: 573 - RNA, 12 nt, Artificial Sequence
  Synthetic
gaccuggagaac

SEQ ID NO: 574 - RNA, 12 nt, Artificial Sequence
  Synthetic
accuggagaacg

SEQ ID NO: 575 - RNA, 12 nt, Artificial Sequence
  Synthetic
ccuggagaacgc

SEQ ID NO: 576 - RNA, 12 nt, Artificial Sequence
  Synthetic
cuggagaacgca

SEQ ID NO: 577 - RNA, 12 nt, Artificial Sequence
  Synthetic
uggagaacgcag

SEQ ID NO: 578 - RNA, 12 nt, Artificial Sequence
  Synthetic
ggagaacgcagu

SEQ ID NO: 579 - RNA, 12 nt, Artificial Sequence
  Synthetic
gagaacgcagug

SEQ ID NO: 580 - RNA, 12 nt, Artificial Sequence
  Synthetic
agaacgcagugc

SEQ ID NO: 581 - RNA, 12 nt, Artificial Sequence
  Synthetic
gaacgcagugcu

SEQ ID NO: 582 - RNA, 12 nt, Artificial Sequence
  Synthetic
aacgcagugcuc

SEQ ID NO: 583 - RNA, 12 nt, Artificial Sequence
  Synthetic
acgcagugcucu

SEQ ID NO: 584 - RNA, 12 nt, Artificial Sequence
  Synthetic
cgcagugcucuu

SEQ ID NO: 585 - RNA, 12 nt, Artificial Sequence
  Synthetic
gcagugcucuuc

SEQ ID NO: 586 - RNA, 12 nt, Artificial Sequence
  Synthetic
cagugcucuucg

SEQ ID NO: 587 - RNA, 12 nt, Artificial Sequence
  Synthetic
agugcucuucga

SEQ ID NO: 588 - RNA, 12 nt, Artificial Sequence
  Synthetic
gugcucuucgaa

SEQ ID NO: 589 - RNA, 12 nt, Artificial Sequence
  Synthetic
ugcucuucgaag

SEQ ID NO: 590 - RNA, 12 nt, Artificial Sequence
  Synthetic
gcucuucgaagu

SEQ ID NO: 591 - RNA, 12 nt, Artificial Sequence
  Synthetic
cucuucgaagug

SEQ ID NO: 592 - RNA, 12 nt, Artificial Sequence
  Synthetic
ucuucgaagugg

SEQ ID NO: 593 - RNA, 12 nt, Artificial Sequence
  Synthetic
cuucgaaguggc

SEQ ID NO: 594 - RNA, 12 nt, Artificial Sequence
  Synthetic
uucgaaguggcc

SEQ ID NO: 595 - RNA, 12 nt, Artificial Sequence
  Synthetic
ucgaaguggccu

SEQ ID NO: 596 - RNA, 12 nt, Artificial Sequence
  Synthetic
cgaaguggccug

SEQ ID NO: 597 - RNA, 12 nt, Artificial Sequence
  Synthetic
gaaguggccugg

SEQ ID NO: 598 - RNA, 12 nt, Artificial Sequence
  Synthetic
aaguggccuggg

SEQ ID NO: 599 - RNA, 12 nt, Artificial Sequence
  Synthetic
aguggccuggga

SEQ ID NO: 600 - RNA, 12 nt, Artificial Sequence
  Synthetic
guggccugggag

SEQ ID NO: 601 - RNA, 12 nt, Artificial Sequence
  Synthetic
uggccugggagg

SEQ ID NO: 602 - RNA, 12 nt, Artificial Sequence
  Synthetic
ggccugggaggu

SEQ ID NO: 603 - RNA, 12 nt, Artificial Sequence
  Synthetic
gccugggaggug

SEQ ID NO: 604 - RNA, 12 nt, Artificial Sequence
  Synthetic
ccugggaggugg

SEQ ID NO: 605 - RNA, 12 nt, Artificial Sequence
  Synthetic
cugggagguggc

SEQ ID NO: 606 - RNA, 12 nt, Artificial Sequence
  Synthetic
ugggagguggcu

SEQ ID NO: 607 - RNA, 12 nt, Artificial Sequence
  Synthetic
gggagguggcua

SEQ ID NO: 608 - RNA, 12 nt, Artificial Sequence
  Synthetic
ggagguggcuaa

SEQ ID NO: 609 - RNA, 12 nt, Artificial Sequence
  Synthetic
gagguggcuaac

SEQ ID NO: 610 - RNA, 12 nt, Artificial Sequence
  Synthetic
agguggcuaaca

SEQ ID NO: 611 - RNA, 12 nt, Artificial Sequence
  Synthetic
gguggcuaacaa

SEQ ID NO: 612 - RNA, 12 nt, Artificial Sequence
  Synthetic
guggcuaacaag

SEQ ID NO: 613 - RNA, 12 nt, Artificial Sequence
  Synthetic
uggcuaacaagg

SEQ ID NO: 614 - RNA, 12 nt, Artificial Sequence
  Synthetic
ggcuaacaaggu

SEQ ID NO: 615 - RNA, 12 nt, Artificial Sequence
  Synthetic
gcuaacaaggug

SEQ ID NO: 616 - RNA, 12 nt, Artificial Sequence
  Synthetic
cuaacaaggugg

SEQ ID NO: 617 - RNA, 12 nt, Artificial Sequence
  Synthetic
uaacaagguggg

SEQ ID NO: 618 - RNA, 12 nt, Artificial Sequence
  Synthetic
aacaaggugggu

SEQ ID NO: 619 - RNA, 12 nt, Artificial Sequence
  Synthetic
acaaggugggug

SEQ ID NO: 620 - RNA, 12 nt, Artificial Sequence
  Synthetic
caaggugggugg

SEQ ID NO: 621 - RNA, 12 nt, Artificial Sequence
  Synthetic
aagguggguggc

SEQ ID NO: 622 - RNA, 12 nt, Artificial Sequence
  Synthetic
agguggguggca

SEQ ID NO: 623 - RNA, 12 nt, Artificial Sequence
  Synthetic
gguggguggcau

SEQ ID NO: 624 - RNA, 12 nt, Artificial Sequence
  Synthetic
guggguggcauc

SEQ ID NO: 625 - RNA, 12 nt, Artificial Sequence
  Synthetic
uggguggcaucu

SEQ ID NO: 626 - RNA, 12 nt, Artificial Sequence
  Synthetic
ggguggcaucua

SEQ ID NO: 627 - RNA, 12 nt, Artificial Sequence
  Synthetic
gguggcaucuac

SEQ ID NO: 628 - RNA, 12 nt, Artificial Sequence
  Synthetic
guggcaucuaca

SEQ ID NO: 629 - RNA, 12 nt, Artificial Sequence
  Synthetic
uggcaucuacac

SEQ ID NO: 630 - RNA, 12 nt, Artificial Sequence
  Synthetic
ggcaucuacacg

SEQ ID NO: 631 - RNA, 12 nt, Artificial Sequence
  Synthetic
gcaucuacacgg

SEQ ID NO: 632 - RNA, 12 nt, Artificial Sequence
  Synthetic
caucuacacggu

SEQ ID NO: 633 - RNA, 12 nt, Artificial Sequence
  Synthetic
aucuacacggug

SEQ ID NO: 634 - RNA, 12 nt, Artificial Sequence
  Synthetic
ucuacacggugc

SEQ ID NO: 635 - RNA, 12 nt, Artificial Sequence
  Synthetic
cuacacggugcu

SEQ ID NO: 636 - RNA, 12 nt, Artificial Sequence
  Synthetic
uacacggugcug

SEQ ID NO: 637 - RNA, 12 nt, Artificial Sequence
  Synthetic
acacggugcugc

SEQ ID NO: 638 - RNA, 12 nt, Artificial Sequence
  Synthetic
cacggugcugca

SEQ ID NO: 639 - RNA, 12 nt, Artificial Sequence
  Synthetic
acggugcugcag

SEQ ID NO: 640 - RNA, 12 nt, Artificial Sequence
  Synthetic
cggugcugcaga

SEQ ID NO: 641 - RNA, 12 nt, Artificial Sequence
  Synthetic
ggugcugcagac

SEQ ID NO: 642 - RNA, 12 nt, Artificial Sequence
  Synthetic
gugcugcagacg

SEQ ID NO: 643 - RNA, 12 nt, Artificial Sequence
  Synthetic
ugcugcagacga

SEQ ID NO: 644 - RNA, 12 nt, Artificial Sequence
  Synthetic
gcugcagacgaa

SEQ ID NO: 645 - RNA, 12 nt, Artificial Sequence
  Synthetic
cugcagacgaag

SEQ ID NO: 646 - RNA, 12 nt, Artificial Sequence
  Synthetic
ugcagacgaagg

SEQ ID NO: 647 - RNA, 12 nt, Artificial Sequence
  Synthetic
gcagacgaaggc

SEQ ID NO: 648 - RNA, 12 nt, Artificial Sequence
  Synthetic
cagacgaaggcg

SEQ ID NO: 649 - RNA, 12 nt, Artificial Sequence
  Synthetic
agacgaaggcga

SEQ ID NO: 650 - RNA, 12 nt, Artificial Sequence
  Synthetic
gacgaaggcgaa

SEQ ID NO: 651 - RNA, 12 nt, Artificial Sequence
  Synthetic
acgaaggcgaag

SEQ ID NO: 652 - RNA, 12 nt, Artificial Sequence
  Synthetic
cgaaggcgaagg

SEQ ID NO: 653 - RNA, 12 nt, Artificial Sequence
  Synthetic
gaaggcgaaggu

SEQ ID NO: 654 - RNA, 12 nt, Artificial Sequence
  Synthetic
aaggcgaaggug

SEQ ID NO: 655 - RNA, 12 nt, Artificial Sequence
  Synthetic
aggcgaagguga

SEQ ID NO: 656 - RNA, 12 nt, Artificial Sequence
  Synthetic
ggcgaaggugac

SEQ ID NO: 657 - RNA, 12 nt, Artificial Sequence
  Synthetic
gcgaaggugaca

SEQ ID NO: 658 - RNA, 12 nt, Artificial Sequence
  Synthetic
cgaaggugacag

SEQ ID NO: 659 - RNA, 12 nt, Artificial Sequence
  Synthetic
gaaggugacagg

SEQ ID NO: 660 - RNA, 12 nt, Artificial Sequence
  Synthetic
aaggugacaggg

SEQ ID NO: 661 - RNA, 12 nt, Artificial Sequence
  Synthetic
aggugacagggg

SEQ ID NO: 662 - RNA, 12 nt, Artificial Sequence
  Synthetic
ggugacagggga

SEQ ID NO: 663 - RNA, 12 nt, Artificial Sequence
  Synthetic
gugacaggggac

SEQ ID NO: 664 - RNA, 12 nt, Artificial Sequence
  Synthetic
ugacaggggacg

SEQ ID NO: 665 - RNA, 12 nt, Artificial Sequence
  Synthetic
gacaggggacga

SEQ ID NO: 666 - RNA, 12 nt, Artificial Sequence
  Synthetic
acaggggacgaa

SEQ ID NO: 667 - RNA, 12 nt, Artificial Sequence
  Synthetic
caggggacgaau

SEQ ID NO: 668 - RNA, 12 nt, Artificial Sequence
  Synthetic
aggggacgaaug

SEQ ID NO: 669 - RNA, 12 nt, Artificial Sequence
  Synthetic
ggggacgaaugg

SEQ ID NO: 670 - RNA, 12 nt, Artificial Sequence
  Synthetic
gggacgaauggg

SEQ ID NO: 671 - RNA, 12 nt, Artificial Sequence
  Synthetic
ggacgaaugggg

SEQ ID NO: 672 - RNA, 12 nt, Artificial Sequence
  Synthetic
gacgaauggggc

SEQ ID NO: 673 - RNA, 12 nt, Artificial Sequence
  Synthetic
acgaauggggcg

SEQ ID NO: 674 - RNA, 12 nt, Artificial Sequence
  Synthetic
cgaauggggcga

SEQ ID NO: 675 - RNA, 12 nt, Artificial Sequence
  Synthetic
gaauggggcgac

SEQ ID NO: 676 - RNA, 12 nt, Artificial Sequence
  Synthetic
aauggggcgaca

SEQ ID NO: 677 - RNA, 12 nt, Artificial Sequence
  Synthetic
auggggcgacaa

SEQ ID NO: 678 - RNA, 12 nt, Artificial Sequence
  Synthetic
uggggcgacaac

SEQ ID NO: 679 - RNA, 12 nt, Artificial Sequence
  Synthetic
ggggcgacaacu

SEQ ID NO: 680 - RNA, 12 nt, Artificial Sequence
  Synthetic
gggcgacaacua

SEQ ID NO: 681 - RNA, 12 nt, Artificial Sequence
  Synthetic
ggcgacaacuac

SEQ ID NO: 682 - RNA, 12 nt, Artificial Sequence
  Synthetic
gcgacaacuacu

SEQ ID NO: 683 - RNA, 12 nt, Artificial Sequence
  Synthetic
cgacaacuacuu

SEQ ID NO: 684 - RNA, 12 nt, Artificial Sequence
  Synthetic
gacaacuacuuc

SEQ ID NO: 685 - RNA, 12 nt, Artificial Sequence
  Synthetic
acaacuacuucc

SEQ ID NO: 686 - RNA, 12 nt, Artificial Sequence
  Synthetic
caacuacuuccu

SEQ ID NO: 687 - RNA, 12 nt, Artificial Sequence
  Synthetic
aacuacuuccug

SEQ ID NO: 688 - RNA, 12 nt, Artificial Sequence
  Synthetic
acuacuuccugg

SEQ ID NO: 689 - RNA, 12 nt, Artificial Sequence
  Synthetic
cuacuuccuggu

SEQ ID NO: 690 - RNA, 12 nt, Artificial Sequence
  Synthetic
uacuuccuggug

SEQ ID NO: 691 - RNA, 12 nt, Artificial Sequence
  Synthetic
acuuccuggugg

SEQ ID NO: 692 - RNA, 12 nt, Artificial Sequence
  Synthetic
cuuccugguggg

SEQ ID NO: 693 - RNA, 12 nt, Artificial Sequence
  Synthetic
uuccuggugggg

SEQ ID NO: 694 - RNA, 12 nt, Artificial Sequence
  Synthetic
uccugguggggc

SEQ ID NO: 695 - RNA, 12 nt, Artificial Sequence
  Synthetic
ccugguggggcc

SEQ ID NO: 696 - RNA, 12 nt, Artificial Sequence
  Synthetic
cugguggggccg

SEQ ID NO: 697 - RNA, 12 nt, Artificial Sequence
  Synthetic
ugguggggccgu

SEQ ID NO: 698 - RNA, 12 nt, Artificial Sequence
  Synthetic
gguggggccgua

SEQ ID NO: 699 - RNA, 12 nt, Artificial Sequence
  Synthetic
guggggccguac

SEQ ID NO: 700 - RNA, 12 nt, Artificial Sequence
  Synthetic
uggggccguaca

SEQ ID NO: 701 - RNA, 12 nt, Artificial Sequence
  Synthetic
ggggccguacac

SEQ ID NO: 702 - RNA, 12 nt, Artificial Sequence
  Synthetic
gggccguacacg

SEQ ID NO: 703 - RNA, 12 nt, Artificial Sequence
  Synthetic
ggccguacacgg

SEQ ID NO: 704 - RNA, 12 nt, Artificial Sequence
  Synthetic
gccguacacgga

SEQ ID NO: 705 - RNA, 12 nt, Artificial Sequence
  Synthetic
ccguacacggag

SEQ ID NO: 706 - RNA, 12 nt, Artificial Sequence
  Synthetic
cguacacggagc

SEQ ID NO: 707 - RNA, 12 nt, Artificial Sequence
  Synthetic
guacacggagca

SEQ ID NO: 708 - RNA, 12 nt, Artificial Sequence
  Synthetic
uacacggagcag

SEQ ID NO: 709 - RNA, 12 nt, Artificial Sequence
  Synthetic
acacggagcagg

SEQ ID NO: 710 - RNA, 12 nt, Artificial Sequence
  Synthetic
cacggagcaggg

SEQ ID NO: 711 - RNA, 12 nt, Artificial Sequence
  Synthetic
acggagcagggc

SEQ ID NO: 712 - RNA, 12 nt, Artificial Sequence
  Synthetic
cggagcagggcg

SEQ ID NO: 713 - RNA, 12 nt, Artificial Sequence
  Synthetic
ggagcagggcgu

SEQ ID NO: 714 - RNA, 12 nt, Artificial Sequence
  Synthetic
gagcagggcgug

SEQ ID NO: 715 - RNA, 12 nt, Artificial Sequence
  Synthetic
agcagggcguga

SEQ ID NO: 716 - RNA, 12 nt, Artificial Sequence
  Synthetic
gcagggcgugag

SEQ ID NO: 717 - RNA, 12 nt, Artificial Sequence
  Synthetic
cagggcgugagg

SEQ ID NO: 718 - RNA, 12 nt, Artificial Sequence
  Synthetic
agggcgugagga

SEQ ID NO: 719 - RNA, 12 nt, Artificial Sequence
  Synthetic
gggcgugaggac

SEQ ID NO: 720 - RNA, 12 nt, Artificial Sequence
  Synthetic
ggcgugaggacc

SEQ ID NO: 721 - RNA, 12 nt, Artificial Sequence
  Synthetic
gcgugaggaccc

SEQ ID NO: 722 - RNA, 12 nt, Artificial Sequence
  Synthetic
cgugaggaccca

SEQ ID NO: 723 - RNA, 12 nt, Artificial Sequence
  Synthetic
gugaggacccag

SEQ ID NO: 724 - RNA, 12 nt, Artificial Sequence
  Synthetic
ugaggacccagg

SEQ ID NO: 725 - RNA, 12 nt, Artificial Sequence
  Synthetic
gaggacccaggu

SEQ ID NO: 726 - RNA, 12 nt, Artificial Sequence
  Synthetic
aggacccaggug

SEQ ID NO: 727 - RNA, 12 nt, Artificial Sequence
  Synthetic
ggacccaggugg

SEQ ID NO: 728 - RNA, 12 nt, Artificial Sequence
  Synthetic
gacccaggugga

SEQ ID NO: 729 - RNA, 12 nt, Artificial Sequence
  Synthetic
acccagguggaa

SEQ ID NO: 730 - RNA, 12 nt, Artificial Sequence
  Synthetic
cccagguggaac

SEQ ID NO: 731 - RNA, 12 nt, Artificial Sequence
  Synthetic
ccagguggaacu

SEQ ID NO: 732 - RNA, 12 nt, Artificial Sequence
  Synthetic
cagguggaacug

SEQ ID NO: 733 - RNA, 12 nt, Artificial Sequence
  Synthetic
agguggaacugc

SEQ ID NO: 734 - RNA, 12 nt, Artificial Sequence
  Synthetic
gguggaacugcu

SEQ ID NO: 735 - RNA, 12 nt, Artificial Sequence
  Synthetic
guggaacugcug

SEQ ID NO: 736 - RNA, 12 nt, Artificial Sequence
  Synthetic
uggaacugcugg

SEQ ID NO: 737 - RNA, 12 nt, Artificial Sequence
  Synthetic
ggaacugcugga

SEQ ID NO: 738 - RNA, 12 nt, Artificial Sequence
  Synthetic
gaacugcuggag

SEQ ID NO: 739 - RNA, 12 nt, Artificial Sequence
  Synthetic
aacugcuggagg

SEQ ID NO: 740 - RNA, 12 nt, Artificial Sequence
  Synthetic
acugcuggaggc

SEQ ID NO: 741 - RNA, 12 nt, Artificial Sequence
  Synthetic
cugcuggaggcc

SEQ ID NO: 742 - RNA, 12 nt, Artificial Sequence
  Synthetic
ugcuggaggccc

SEQ ID NO: 743 - RNA, 12 nt, Artificial Sequence
  Synthetic
gcuggaggcccc

SEQ ID NO: 744 - RNA, 12 nt, Artificial Sequence
  Synthetic
cuggaggccccc

SEQ ID NO: 745 - RNA, 12 nt, Artificial Sequence
  Synthetic
uggaggccccca

SEQ ID NO: 746 - RNA, 12 nt, Artificial Sequence
  Synthetic
ggaggcccccac

SEQ ID NO: 747 - RNA, 12 nt, Artificial Sequence
  Synthetic
gaggcccccacc

SEQ ID NO: 748 - RNA, 12 nt, Artificial Sequence
  Synthetic
aggcccccaccc

SEQ ID NO: 749 - RNA, 12 nt, Artificial Sequence
  Synthetic
ggcccccacccc

SEQ ID NO: 750 - RNA, 12 nt, Artificial Sequence
  Synthetic
gcccccaccccg

SEQ ID NO: 751 - RNA, 12 nt, Artificial Sequence
  Synthetic
cccccaccccgg

SEQ ID NO: 752 - RNA, 12 nt, Artificial Sequence
  Synthetic
ccccaccccggc

SEQ ID NO: 753 - RNA, 12 nt, Artificial Sequence
  Synthetic
cccaccccggcc

SEQ ID NO: 754 - RNA, 12 nt, Artificial Sequence
  Synthetic
ccaccccggccc

SEQ ID NO: 755 - RNA, 12 nt, Artificial Sequence
  Synthetic
caccccggcccu

SEQ ID NO: 756 - RNA, 12 nt, Artificial Sequence
  Synthetic
accccggcccug

SEQ ID NO: 757 - RNA, 12 nt, Artificial Sequence
  Synthetic
ccccggcccuga

SEQ ID NO: 758 - RNA, 12 nt, Artificial Sequence
  Synthetic
cccggcccugaa

SEQ ID NO: 759 - RNA, 12 nt, Artificial Sequence
  Synthetic
ccggcccugaag

SEQ ID NO: 760 - RNA, 12 nt, Artificial Sequence
  Synthetic
cggcccugaaga

SEQ ID NO: 761 - RNA, 12 nt, Artificial Sequence
  Synthetic
ggcccugaagag

SEQ ID NO: 762 - RNA, 12 nt, Artificial Sequence
  Synthetic
gcccugaagagg

SEQ ID NO: 763 - RNA, 12 nt, Artificial Sequence
  Synthetic
cccugaagagga

SEQ ID NO: 764 - RNA, 12 nt, Artificial Sequence
  Synthetic
ccugaagaggac

SEQ ID NO: 765 - RNA, 12 nt, Artificial Sequence
  Synthetic
cugaagaggaca

SEQ ID NO: 766 - RNA, 12 nt, Artificial Sequence
  Synthetic
ugaagaggacac

SEQ ID NO: 767 - RNA, 12 nt, Artificial Sequence
  Synthetic
gaagaggacacu

SEQ ID NO: 768 - RNA, 12 nt, Artificial Sequence
  Synthetic
aagaggacacug

SEQ ID NO: 769 - RNA, 12 nt, Artificial Sequence
  Synthetic
agaggacacugg

SEQ ID NO: 770 - RNA, 12 nt, Artificial Sequence
  Synthetic
gaggacacugga

SEQ ID NO: 771 - RNA, 12 nt, Artificial Sequence
  Synthetic
aggacacuggau

SEQ ID NO: 772 - RNA, 12 nt, Artificial Sequence
  Synthetic
ggacacuggauu

SEQ ID NO: 773 - RNA, 12 nt, Artificial Sequence
  Synthetic
gacacuggauuc

SEQ ID NO: 774 - RNA, 12 nt, Artificial Sequence
  Synthetic
acacuggauucc

SEQ ID NO: 775 - RNA, 12 nt, Artificial Sequence
  Synthetic
cacuggauucca

SEQ ID NO: 776 - RNA, 12 nt, Artificial Sequence
  Synthetic
acuggauuccau

SEQ ID NO: 777 - RNA, 12 nt, Artificial Sequence
  Synthetic
cuggauuccaug

SEQ ID NO: 778 - RNA, 12 nt, Artificial Sequence
  Synthetic
uggauuccauga

SEQ ID NO: 779 - RNA, 12 nt, Artificial Sequence
  Synthetic
ggauuccaugaa

SEQ ID NO: 780 - RNA, 12 nt, Artificial Sequence
  Synthetic
gauuccaugaac

SEQ ID NO: 781 - RNA, 12 nt, Artificial Sequence
  Synthetic
auuccaugaaca

SEQ ID NO: 782 - RNA, 12 nt, Artificial Sequence
  Synthetic
uuccaugaacag

SEQ ID NO: 783 - RNA, 12 nt, Artificial Sequence
  Synthetic
uccaugaacagc

SEQ ID NO: 784 - RNA, 12 nt, Artificial Sequence
  Synthetic
ccaugaacagca

SEQ ID NO: 785 - RNA, 12 nt, Artificial Sequence
  Synthetic
caugaacagcaa

SEQ ID NO: 786 - RNA, 12 nt, Artificial Sequence
  Synthetic
augaacagcaag

SEQ ID NO: 787 - RNA, 12 nt, Artificial Sequence
  Synthetic
ugaacagcaagg

SEQ ID NO: 788 - RNA, 12 nt, Artificial Sequence
  Synthetic
gaacagcaaggg

SEQ ID NO: 789 - RNA, 12 nt, Artificial Sequence
  Synthetic
aacagcaagggc

SEQ ID NO: 790 - RNA, 12 nt, Artificial Sequence
  Synthetic
acagcaagggcu

SEQ ID NO: 791 - RNA, 12 nt, Artificial Sequence
  Synthetic
cagcaagggcug

SEQ ID NO: 792 - RNA, 12 nt, Artificial Sequence
  Synthetic
agcaagggcugc

SEQ ID NO: 793 - RNA, 12 nt, Artificial Sequence
  Synthetic
gcaagggcugca

SEQ ID NO: 794 - RNA, 12 nt, Artificial Sequence
  Synthetic
caagggcugcaa

SEQ ID NO: 795 - RNA, 12 nt, Artificial Sequence
  Synthetic
aagggcugcaag

SEQ ID NO: 796 - RNA, 12 nt, Artificial Sequence
  Synthetic
agggcugcaagg

SEQ ID NO: 797 - RNA, 12 nt, Artificial Sequence
  Synthetic
gggcugcaaggu

SEQ ID NO: 798 - RNA, 12 nt, Artificial Sequence
  Synthetic
ggcugcaaggug

SEQ ID NO: 799 - RNA, 12 nt, Artificial Sequence
  Synthetic
gcugcaaggugu

SEQ ID NO: 800 - RNA, 12 nt, Artificial Sequence
  Synthetic
cugcaaggugua

SEQ ID NO: 801 - RNA, 12 nt, Artificial Sequence
  Synthetic
ugcaagguguau

SEQ ID NO: 802 - RNA, 12 nt, Artificial Sequence
  Synthetic
gcaagguguauu

SEQ ID NO: 803 - RNA, 12 nt, Artificial Sequence
  Synthetic
caagguguauuu

SEQ ID NO: 804 - RNA, 12 nt, Artificial Sequence
  Synthetic
aagguguauuuc

SEQ ID NO: 805 - RNA, 12 nt, Artificial Sequence
  Synthetic
agguguauuucg

SEQ ID NO: 806 - RNA, 12 nt, Artificial Sequence
  Synthetic
gguguauuucgg

SEQ ID NO: 807 - RNA, 12 nt, Artificial Sequence
  Synthetic
guguauuucggg

SEQ ID NO: 808 - RNA, 12 nt, Artificial Sequence
  Synthetic
uguauuucgggc

SEQ ID NO: 809 - RNA, 12 nt, Artificial Sequence
  Synthetic
guauuucgggcg

SEQ ID NO: 810 - RNA, 12 nt, Artificial Sequence
  Synthetic
uauuucgggcgc

SEQ ID NO: 811 - RNA, 12 nt, Artificial Sequence
  Synthetic
auuucgggcgcu

SEQ ID NO: 812 - RNA, 12 nt, Artificial Sequence
  Synthetic
uuucgggcgcug

SEQ ID NO: 813 - RNA, 12 nt, Artificial Sequence
  Synthetic
uucgggcgcugg

SEQ ID NO: 814 - RNA, 12 nt, Artificial Sequence
  Synthetic
ucgggcgcuggc

SEQ ID NO: 815 - RNA, 12 nt, Artificial Sequence
  Synthetic
cgggcgcuggcu

SEQ ID NO: 816 - RNA, 12 nt, Artificial Sequence
  Synthetic
gggcgcuggcug

SEQ ID NO: 817 - RNA, 12 nt, Artificial Sequence
  Synthetic
ggcgcuggcuga

SEQ ID NO: 818 - RNA, 12 nt, Artificial Sequence
  Synthetic
gcgcuggcugau

SEQ ID NO: 819 - RNA, 12 nt, Artificial Sequence
  Synthetic
cgcuggcugauc

SEQ ID NO: 820 - RNA, 12 nt, Artificial Sequence
  Synthetic
gcuggcugaucg

SEQ ID NO: 821 - RNA, 12 nt, Artificial Sequence
  Synthetic
cuggcugaucga

SEQ ID NO: 822 - RNA, 12 nt, Artificial Sequence
  Synthetic
uggcugaucgag

SEQ ID NO: 823 - RNA, 12 nt, Artificial Sequence
  Synthetic
ggcugaucgagg

SEQ ID NO: 824 - RNA, 12 nt, Artificial Sequence
  Synthetic
gcugaucgaggg

SEQ ID NO: 825 - RNA, 12 nt, Artificial Sequence
  Synthetic
cugaucgaggga

SEQ ID NO: 826 - RNA, 12 nt, Artificial Sequence
  Synthetic
ugaucgagggag

SEQ ID NO: 827 - RNA, 12 nt, Artificial Sequence
  Synthetic
gaucgagggagg

SEQ ID NO: 828 - RNA, 12 nt, Artificial Sequence
  Synthetic
aucgagggaggc

SEQ ID NO: 829 - RNA, 12 nt, Artificial Sequence
  Synthetic
ucgagggaggcc

SEQ ID NO: 830 - RNA, 12 nt, Artificial Sequence
  Synthetic
cgagggaggccc

SEQ ID NO: 831 - RNA, 12 nt, Artificial Sequence
  Synthetic
gagggaggcccu

SEQ ID NO: 832 - RNA, 12 nt, Artificial Sequence
  Synthetic
agggaggcccuc

SEQ ID NO: 833 - RNA, 12 nt, Artificial Sequence
  Synthetic
gggaggcccucu

SEQ ID NO: 834 - RNA, 12 nt, Artificial Sequence
  Synthetic
ggaggcccucug

SEQ ID NO: 835 - RNA, 12 nt, Artificial Sequence
  Synthetic
gaggcccucugg

SEQ ID NO: 836 - RNA, 12 nt, Artificial Sequence
  Synthetic
aggcccucuggu

SEQ ID NO: 837 - RNA, 12 nt, Artificial Sequence
  Synthetic
ggcccucuggug

SEQ ID NO: 838 - RNA, 12 nt, Artificial Sequence
  Synthetic
gcccucuggugg

SEQ ID NO: 839 - RNA, 12 nt, Artificial Sequence
  Synthetic
cccucugguggu

SEQ ID NO: 840 - RNA, 12 nt, Artificial Sequence
  Synthetic
ccucugguggug

SEQ ID NO: 841 - RNA, 12 nt, Artificial Sequence
  Synthetic
cucugguggugc

SEQ ID NO: 842 - RNA, 12 nt, Artificial Sequence
  Synthetic
ucugguggugcu

SEQ ID NO: 843 - RNA, 12 nt, Artificial Sequence
  Synthetic
cugguggugcuc

SEQ ID NO: 844 - RNA, 12 nt, Artificial Sequence
  Synthetic
ugguggugcucc

SEQ ID NO: 845 - RNA, 12 nt, Artificial Sequence
  Synthetic
gguggugcuccu

SEQ ID NO: 846 - RNA, 12 nt, Artificial Sequence
  Synthetic
guggugcuccug

SEQ ID NO: 847 - RNA, 12 nt, Artificial Sequence
  Synthetic
uggugcuccugg

SEQ ID NO: 848 - RNA, 12 nt, Artificial Sequence
  Synthetic
ggugcuccugga

SEQ ID NO: 849 - RNA, 12 nt, Artificial Sequence
  Synthetic
gugcuccuggac

SEQ ID NO: 850 - RNA, 12 nt, Artificial Sequence
  Synthetic
ugcuccuggacg

SEQ ID NO: 851 - RNA, 12 nt, Artificial Sequence
  Synthetic
gcuccuggacgu

SEQ ID NO: 852 - RNA, 12 nt, Artificial Sequence
  Synthetic
cuccuggacgug

SEQ ID NO: 853 - RNA, 12 nt, Artificial Sequence
  Synthetic
uccuggacgugg

SEQ ID NO: 854 - RNA, 12 nt, Artificial Sequence
  Synthetic
ccuggacguggg

SEQ ID NO: 855 - RNA, 12 nt, Artificial Sequence
  Synthetic
cuggacgugggu

SEQ ID NO: 856 - RNA, 12 nt, Artificial Sequence
  Synthetic
uggacgugggug

SEQ ID NO: 857 - RNA, 12 nt, Artificial Sequence
  Synthetic
ggacgugggugc

SEQ ID NO: 858 - RNA, 12 nt, Artificial Sequence
  Synthetic
gacgugggugcc

SEQ ID NO: 859 - RNA, 12 nt, Artificial Sequence
  Synthetic
acgugggugccu

SEQ ID NO: 860 - RNA, 12 nt, Artificial Sequence
  Synthetic
cgugggugccuc

SEQ ID NO: 861 - RNA, 12 nt, Artificial Sequence
  Synthetic
gugggugccuca

SEQ ID NO: 862 - RNA, 12 nt, Artificial Sequence
  Synthetic
ugggugccucag

SEQ ID NO: 863 - RNA, 12 nt, Artificial Sequence
  Synthetic
gggugccucagc

SEQ ID NO: 864 - RNA, 12 nt, Artificial Sequence
  Synthetic
ggugccucagcu

SEQ ID NO: 865 - RNA, 12 nt, Artificial Sequence
  Synthetic
gugccucagcuu

SEQ ID NO: 866 - RNA, 12 nt, Artificial Sequence
  Synthetic
ugccucagcuug

SEQ ID NO: 867 - RNA, 12 nt, Artificial Sequence
  Synthetic
gccucagcuugg

SEQ ID NO: 868 - RNA, 12 nt, Artificial Sequence
  Synthetic
ccucagcuuggg

SEQ ID NO: 869 - RNA, 12 nt, Artificial Sequence
  Synthetic
cucagcuugggc

SEQ ID NO: 870 - RNA, 12 nt, Artificial Sequence
  Synthetic
ucagcuugggcc

SEQ ID NO: 871 - RNA, 12 nt, Artificial Sequence
  Synthetic
cagcuugggccc

SEQ ID NO: 872 - RNA, 12 nt, Artificial Sequence
  Synthetic
agcuugggcccu

SEQ ID NO: 873 - RNA, 12 nt, Artificial Sequence
  Synthetic
gcuugggcccug

SEQ ID NO: 874 - RNA, 12 nt, Artificial Sequence
  Synthetic
cuugggcccugg

SEQ ID NO: 875 - RNA, 12 nt, Artificial Sequence
  Synthetic
uugggcccugga

SEQ ID NO: 876 - RNA, 12 nt, Artificial Sequence
  Synthetic
ugggcccuggag

SEQ ID NO: 877 - RNA, 12 nt, Artificial Sequence
  Synthetic
gggcccuggagc

SEQ ID NO: 878 - RNA, 12 nt, Artificial Sequence
  Synthetic
ggcccuggagcg

SEQ ID NO: 879 - RNA, 12 nt, Artificial Sequence
  Synthetic
gcccuggagcgc

SEQ ID NO: 880 - RNA, 12 nt, Artificial Sequence
  Synthetic
cccuggagcgcu

SEQ ID NO: 881 - RNA, 12 nt, Artificial Sequence
  Synthetic
ccuggagcgcug

SEQ ID NO: 882 - RNA, 12 nt, Artificial Sequence
  Synthetic
cuggagcgcugg

SEQ ID NO: 883 - RNA, 12 nt, Artificial Sequence
  Synthetic
uggagcgcugga

SEQ ID NO: 884 - RNA, 12 nt, Artificial Sequence
  Synthetic
ggagcgcuggaa

SEQ ID NO: 885 - RNA, 12 nt, Artificial Sequence
  Synthetic
gagcgcuggaag

SEQ ID NO: 886 - RNA, 12 nt, Artificial Sequence
  Synthetic
agcgcuggaagg

SEQ ID NO: 887 - RNA, 12 nt, Artificial Sequence
  Synthetic
gcgcuggaaggg

SEQ ID NO: 888 - RNA, 12 nt, Artificial Sequence
  Synthetic
cgcuggaaggga

SEQ ID NO: 889 - RNA, 12 nt, Artificial Sequence
  Synthetic
gcuggaagggag

SEQ ID NO: 890 - RNA, 12 nt, Artificial Sequence
  Synthetic
cuggaagggaga

SEQ ID NO: 891 - RNA, 12 nt, Artificial Sequence
  Synthetic
uggaagggagag

SEQ ID NO: 892 - RNA, 12 nt, Artificial Sequence
  Synthetic
ggaagggagagc

SEQ ID NO: 893 - RNA, 12 nt, Artificial Sequence
  Synthetic
gaagggagagcu

SEQ ID NO: 894 - RNA, 12 nt, Artificial Sequence
  Synthetic
aagggagagcuc

SEQ ID NO: 895 - RNA, 12 nt, Artificial Sequence
  Synthetic
agggagagcucu

SEQ ID NO: 896 - RNA, 12 nt, Artificial Sequence
  Synthetic
gggagagcucug

SEQ ID NO: 897 - RNA, 12 nt, Artificial Sequence
  Synthetic
ggagagcucugg

SEQ ID NO: 898 - RNA, 12 nt, Artificial Sequence
  Synthetic
gagagcucuggg

SEQ ID NO: 899 - RNA, 12 nt, Artificial Sequence
  Synthetic
agagcucuggga

SEQ ID NO: 900 - RNA, 12 nt, Artificial Sequence
  Synthetic
gagcucugggau

SEQ ID NO: 901 - RNA, 12 nt, Artificial Sequence
  Synthetic
agcucugggaua

SEQ ID NO: 902 - RNA, 12 nt, Artificial Sequence
  Synthetic
gcucugggauac

SEQ ID NO: 903 - RNA, 12 nt, Artificial Sequence
  Synthetic
cucugggauacc

SEQ ID NO: 904 - RNA, 12 nt, Artificial Sequence
  Synthetic
ucugggauaccu

SEQ ID NO: 905 - RNA, 12 nt, Artificial Sequence
  Synthetic
cugggauaccug

SEQ ID NO: 906 - RNA, 12 nt, Artificial Sequence
  Synthetic
ugggauaccugc

SEQ ID NO: 907 - RNA, 12 nt, Artificial Sequence
  Synthetic
gggauaccugca

SEQ ID NO: 908 - RNA, 12 nt, Artificial Sequence
  Synthetic
ggauaccugcaa

SEQ ID NO: 909 - RNA, 12 nt, Artificial Sequence
  Synthetic
gauaccugcaac

SEQ ID NO: 910 - RNA, 12 nt, Artificial Sequence
  Synthetic
auaccugcaaca

SEQ ID NO: 911 - RNA, 12 nt, Artificial Sequence
  Synthetic
uaccugcaacau

SEQ ID NO: 912 - RNA, 12 nt, Artificial Sequence
  Synthetic
accugcaacauc

SEQ ID NO: 913 - RNA, 12 nt, Artificial Sequence
  Synthetic
ccugcaacaucg

SEQ ID NO: 914 - RNA, 12 nt, Artificial Sequence
  Synthetic
cugcaacaucgg

SEQ ID NO: 915 - RNA, 12 nt, Artificial Sequence
  Synthetic
ugcaacaucgga

SEQ ID NO: 916 - RNA, 12 nt, Artificial Sequence
  Synthetic
gcaacaucggag

SEQ ID NO: 917 - RNA, 12 nt, Artificial Sequence
  Synthetic
caacaucggagu

SEQ ID NO: 918 - RNA, 12 nt, Artificial Sequence
  Synthetic
aacaucggagug

SEQ ID NO: 919 - RNA, 12 nt, Artificial Sequence
  Synthetic
acaucggagugc

SEQ ID NO: 920 - RNA, 12 nt, Artificial Sequence
  Synthetic
caucggagugcc

SEQ ID NO: 921 - RNA, 12 nt, Artificial Sequence
  Synthetic
aucggagugccg

SEQ ID NO: 922 - RNA, 12 nt, Artificial Sequence
  Synthetic
ucggagugccgu

SEQ ID NO: 923 - RNA, 12 nt, Artificial Sequence
  Synthetic
cggagugccgug

SEQ ID NO: 924 - RNA, 12 nt, Artificial Sequence
  Synthetic
ggagugccgugg

SEQ ID NO: 925 - RNA, 12 nt, Artificial Sequence
  Synthetic
gagugccguggu

SEQ ID NO: 926 - RNA, 12 nt, Artificial Sequence
  Synthetic
agugccguggua

SEQ ID NO: 927 - RNA, 12 nt, Artificial Sequence
  Synthetic
gugccgugguac

SEQ ID NO: 928 - RNA, 12 nt, Artificial Sequence
  Synthetic
ugccgugguacg

SEQ ID NO: 929 - RNA, 12 nt, Artificial Sequence
  Synthetic
gccgugguacga

SEQ ID NO: 930 - RNA, 12 nt, Artificial Sequence
  Synthetic
ccgugguacgac

SEQ ID NO: 931 - RNA, 12 nt, Artificial Sequence
  Synthetic
cgugguacgacc

SEQ ID NO: 932 - RNA, 12 nt, Artificial Sequence
  Synthetic
gugguacgaccg

SEQ ID NO: 933 - RNA, 12 nt, Artificial Sequence
  Synthetic
ugguacgaccgc

SEQ ID NO: 934 - RNA, 12 nt, Artificial Sequence
  Synthetic
gguacgaccgcg

SEQ ID NO: 935 - RNA, 12 nt, Artificial Sequence
  Synthetic
guacgaccgcga

SEQ ID NO: 936 - RNA, 12 nt, Artificial Sequence
  Synthetic
uacgaccgcgag

SEQ ID NO: 937 - RNA, 12 nt, Artificial Sequence
  Synthetic
acgaccgcgagg

SEQ ID NO: 938 - RNA, 12 nt, Artificial Sequence
  Synthetic
cgaccgcgaggc

SEQ ID NO: 939 - RNA, 12 nt, Artificial Sequence
  Synthetic
gaccgcgaggcc

SEQ ID NO: 940 - RNA, 12 nt, Artificial Sequence
  Synthetic
accgcgaggcca

SEQ ID NO: 941 - RNA, 12 nt, Artificial Sequence
  Synthetic
ccgcgaggccaa

SEQ ID NO: 942 - RNA, 12 nt, Artificial Sequence
  Synthetic
cgcgaggccaac

SEQ ID NO: 943 - RNA, 12 nt, Artificial Sequence
  Synthetic
gcgaggccaacg

SEQ ID NO: 944 - RNA, 12 nt, Artificial Sequence
  Synthetic
cgaggccaacga

SEQ ID NO: 945 - RNA, 12 nt, Artificial Sequence
  Synthetic
gaggccaacgac

SEQ ID NO: 946 - RNA, 12 nt, Artificial Sequence
  Synthetic
aggccaacgacg

SEQ ID NO: 947 - RNA, 12 nt, Artificial Sequence
  Synthetic
ggccaacgacgc

SEQ ID NO: 948 - RNA, 12 nt, Artificial Sequence
  Synthetic
gccaacgacgcu

SEQ ID NO: 949 - RNA, 12 nt, Artificial Sequence
  Synthetic
ccaacgacgcug

SEQ ID NO: 950 - RNA, 12 nt, Artificial Sequence
  Synthetic
caacgacgcugu

SEQ ID NO: 951 - RNA, 12 nt, Artificial Sequence
  Synthetic
aacgacgcuguc

SEQ ID NO: 952 - RNA, 12 nt, Artificial Sequence
  Synthetic
acgacgcugucc

SEQ ID NO: 953 - RNA, 12 nt, Artificial Sequence
  Synthetic
cgacgcuguccu

SEQ ID NO: 954 - RNA, 12 nt, Artificial Sequence
  Synthetic
gacgcuguccuc

SEQ ID NO: 955 - RNA, 12 nt, Artificial Sequence
  Synthetic
acgcuguccucu

SEQ ID NO: 956 - RNA, 12 nt, Artificial Sequence
  Synthetic
cgcuguccucuu

SEQ ID NO: 957 - RNA, 12 nt, Artificial Sequence
  Synthetic
gcuguccucuuu

SEQ ID NO: 958 - RNA, 12 nt, Artificial Sequence
  Synthetic
cuguccucuuug

SEQ ID NO: 959 - RNA, 12 nt, Artificial Sequence
  Synthetic
uguccucuuugg

SEQ ID NO: 960 - RNA, 12 nt, Artificial Sequence
  Synthetic
guccucuuuggc

SEQ ID NO: 961 - RNA, 12 nt, Artificial Sequence
  Synthetic
uccucuuuggcu

SEQ ID NO: 962 - RNA, 12 nt, Artificial Sequence
  Synthetic
ccucuuuggcuu

SEQ ID NO: 963 - RNA, 12 nt, Artificial Sequence
  Synthetic
cucuuuggcuuu

SEQ ID NO: 964 - RNA, 12 nt, Artificial Sequence
  Synthetic
ucuuuggcuuuc

SEQ ID NO: 965 - RNA, 12 nt, Artificial Sequence
  Synthetic
cuuuggcuuucu

SEQ ID NO: 966 - RNA, 12 nt, Artificial Sequence
  Synthetic
uuuggcuuucug

SEQ ID NO: 967 - RNA, 12 nt, Artificial Sequence
  Synthetic
uuggcuuucuga

SEQ ID NO: 968 - RNA, 12 nt, Artificial Sequence
  Synthetic
uggcuuucugac

SEQ ID NO: 969 - RNA, 12 nt, Artificial Sequence
  Synthetic
ggcuuucugacc

SEQ ID NO: 970 - RNA, 12 nt, Artificial Sequence
  Synthetic
gcuuucugacca

SEQ ID NO: 971 - RNA, 12 nt, Artificial Sequence
  Synthetic
cuuucugaccac

SEQ ID NO: 972 - RNA, 12 nt, Artificial Sequence
  Synthetic
uuucugaccacc

SEQ ID NO: 973 - RNA, 12 nt, Artificial Sequence
  Synthetic
uucugaccaccu

SEQ ID NO: 974 - RNA, 12 nt, Artificial Sequence
  Synthetic
ucugaccaccug

SEQ ID NO: 975 - RNA, 12 nt, Artificial Sequence
  Synthetic
cugaccaccugg

SEQ ID NO: 976 - RNA, 12 nt, Artificial Sequence
  Synthetic
ugaccaccuggu

SEQ ID NO: 977 - RNA, 12 nt, Artificial Sequence
  Synthetic
gaccaccugguu

SEQ ID NO: 978 - RNA, 12 nt, Artificial Sequence
  Synthetic
accaccugguuc

SEQ ID NO: 979 - RNA, 12 nt, Artificial Sequence
  Synthetic
ccaccugguucc

SEQ ID NO: 980 - RNA, 12 nt, Artificial Sequence
  Synthetic
caccugguuccu

SEQ ID NO: 981 - RNA, 12 nt, Artificial Sequence
  Synthetic
accugguuccug

SEQ ID NO: 982 - RNA, 12 nt, Artificial Sequence
  Synthetic
ccugguuccugg

SEQ ID NO: 983 - RNA, 12 nt, Artificial Sequence
  Synthetic
cugguuccuggg

SEQ ID NO: 984 - RNA, 12 nt, Artificial Sequence
  Synthetic
ugguuccugggu

SEQ ID NO: 985 - RNA, 12 nt, Artificial Sequence
  Synthetic
gguuccugggug

SEQ ID NO: 986 - RNA, 12 nt, Artificial Sequence
  Synthetic
guuccuggguga

SEQ ID NO: 987 - RNA, 12 nt, Artificial Sequence
  Synthetic
uuccugggugag

SEQ ID NO: 988 - RNA, 12 nt, Artificial Sequence
  Synthetic
uccugggugagu

SEQ ID NO: 989 - RNA, 12 nt, Artificial Sequence
  Synthetic
ccugggugaguu

SEQ ID NO: 990 - RNA, 12 nt, Artificial Sequence
  Synthetic
cugggugaguuc

SEQ ID NO: 991 - RNA, 12 nt, Artificial Sequence
  Synthetic
ugggugaguucc

SEQ ID NO: 992 - RNA, 12 nt, Artificial Sequence
  Synthetic
gggugaguuccu

SEQ ID NO: 993 - RNA, 12 nt, Artificial Sequence
  Synthetic
ggugaguuccug

SEQ ID NO: 994 - RNA, 12 nt, Artificial Sequence
  Synthetic
gugaguuccugg

SEQ ID NO: 995 - RNA, 12 nt, Artificial Sequence
  Synthetic
ugaguuccuggc

SEQ ID NO: 996 - RNA, 12 nt, Artificial Sequence
  Synthetic
gaguuccuggca

SEQ ID NO: 997 - RNA, 12 nt, Artificial Sequence
  Synthetic
aguuccuggcac

SEQ ID NO: 998 - RNA, 12 nt, Artificial Sequence
  Synthetic
guuccuggcaca

SEQ ID NO: 999 - RNA, 12 nt, Artificial Sequence
  Synthetic
uuccuggcacag

SEQ ID NO: 1000 - RNA, 12 nt, Artificial Sequence
  Synthetic
uccuggcacaga

SEQ ID NO: 1001 - RNA, 12 nt, Artificial Sequence
  Synthetic
ccuggcacagag

SEQ ID NO: 1002 - RNA, 12 nt, Artificial Sequence
  Synthetic
cuggcacagagu

SEQ ID NO: 1003 - RNA, 12 nt, Artificial Sequence
  Synthetic
uggcacagagug

SEQ ID NO: 1004 - RNA, 12 nt, Artificial Sequence
  Synthetic
ggcacagaguga

SEQ ID NO: 1005 - RNA, 12 nt, Artificial Sequence
  Synthetic
gcacagagugag

SEQ ID NO: 1006 - RNA, 12 nt, Artificial Sequence
  Synthetic
cacagagugagg

SEQ ID NO: 1007 - RNA, 12 nt, Artificial Sequence
  Synthetic
acagagugagga

SEQ ID NO: 1008 - RNA, 12 nt, Artificial Sequence
  Synthetic
cagagugaggag

SEQ ID NO: 1009 - RNA, 12 nt, Artificial Sequence
  Synthetic
agagugaggaga

SEQ ID NO: 1010 - RNA, 12 nt, Artificial Sequence
  Synthetic
gagugaggagaa

SEQ ID NO: 1011 - RNA, 12 nt, Artificial Sequence
  Synthetic
agugaggagaag

SEQ ID NO: 1012 - RNA, 12 nt, Artificial Sequence
  Synthetic
gugaggagaagc

SEQ ID NO: 1013 - RNA, 12 nt, Artificial Sequence
  Synthetic
ugaggagaagcc

SEQ ID NO: 1014 - RNA, 12 nt, Artificial Sequence
  Synthetic
gaggagaagcca

SEQ ID NO: 1015 - RNA, 12 nt, Artificial Sequence
  Synthetic
aggagaagccac

SEQ ID NO: 1016 - RNA, 12 nt, Artificial Sequence
  Synthetic
ggagaagccaca

SEQ ID NO: 1017 - RNA, 12 nt, Artificial Sequence
  Synthetic
gagaagccacau

SEQ ID NO: 1018 - RNA, 12 nt, Artificial Sequence
  Synthetic
agaagccacaug

SEQ ID NO: 1019 - RNA, 12 nt, Artificial Sequence
  Synthetic
gaagccacaugu

SEQ ID NO: 1020 - RNA, 12 nt, Artificial Sequence
  Synthetic
aagccacaugug

SEQ ID NO: 1021 - RNA, 12 nt, Artificial Sequence
  Synthetic
agccacaugugg

SEQ ID NO: 1022 - RNA, 12 nt, Artificial Sequence
  Synthetic
gccacauguggu

SEQ ID NO: 1023 - RNA, 12 nt, Artificial Sequence
  Synthetic
ccacaugugguu

SEQ ID NO: 1024 - RNA, 12 nt, Artificial Sequence
  Synthetic
cacaugugguug

SEQ ID NO: 1025 - RNA, 12 nt, Artificial Sequence
  Synthetic
acaugugguugc

SEQ ID NO: 1026 - RNA, 12 nt, Artificial Sequence
  Synthetic
caugugguugcu

SEQ ID NO: 1027 - RNA, 12 nt, Artificial Sequence
  Synthetic
augugguugcuc

SEQ ID NO: 1028 - RNA, 12 nt, Artificial Sequence
  Synthetic
ugugguugcuca

SEQ ID NO: 1029 - RNA, 12 nt, Artificial Sequence
  Synthetic
gugguugcucac

SEQ ID NO: 1030 - RNA, 12 nt, Artificial Sequence
  Synthetic
ugguugcucacu

SEQ ID NO: 1031 - RNA, 12 nt, Artificial Sequence
  Synthetic
gguugcucacuu

SEQ ID NO: 1032 - RNA, 12 nt, Artificial Sequence
  Synthetic
guugcucacuuc

SEQ ID NO: 1033 - RNA, 12 nt, Artificial Sequence
  Synthetic
uugcucacuucc

SEQ ID NO: 1034 - RNA, 12 nt, Artificial Sequence
  Synthetic
ugcucacuucca

SEQ ID NO: 1035 - RNA, 12 nt, Artificial Sequence
  Synthetic
gcucacuuccau

SEQ ID NO: 1036 - RNA, 12 nt, Artificial Sequence
  Synthetic
cucacuuccaug

SEQ ID NO: 1037 - RNA, 12 nt, Artificial Sequence
  Synthetic
ucacuuccauga

SEQ ID NO: 1038 - RNA, 12 nt, Artificial Sequence
  Synthetic
cacuuccaugag

SEQ ID NO: 1039 - RNA, 12 nt, Artificial Sequence
  Synthetic
acuuccaugagu

SEQ ID NO: 1040 - RNA, 12 nt, Artificial Sequence
  Synthetic
cuuccaugagug

SEQ ID NO: 1041 - RNA, 12 nt, Artificial Sequence
  Synthetic
uuccaugagugg

SEQ ID NO: 1042 - RNA, 12 nt, Artificial Sequence
  Synthetic
uccaugaguggu

SEQ ID NO: 1043 - RNA, 12 nt, Artificial Sequence
  Synthetic
ccaugagugguu

SEQ ID NO: 1044 - RNA, 12 nt, Artificial Sequence
  Synthetic
caugagugguug

SEQ ID NO: 1045 - RNA, 12 nt, Artificial Sequence
  Synthetic
augagugguugg

SEQ ID NO: 1046 - RNA, 12 nt, Artificial Sequence
  Synthetic
ugagugguuggc

SEQ ID NO: 1047 - RNA, 12 nt, Artificial Sequence
  Synthetic
gagugguuggca

SEQ ID NO: 1048 - RNA, 12 nt, Artificial Sequence
  Synthetic
agugguuggcag

SEQ ID NO: 1049 - RNA, 12 nt, Artificial Sequence
  Synthetic
gugguuggcagg

SEQ ID NO: 1050 - RNA, 12 nt, Artificial Sequence
  Synthetic
ugguuggcaggc

SEQ ID NO: 1051 - RNA, 12 nt, Artificial Sequence
  Synthetic
gguuggcaggcg

SEQ ID NO: 1052 - RNA, 12 nt, Artificial Sequence
  Synthetic
guuggcaggcgu

SEQ ID NO: 1053 - RNA, 12 nt, Artificial Sequence
  Synthetic
uuggcaggcguu

SEQ ID NO: 1054 - RNA, 12 nt, Artificial Sequence
  Synthetic
uggcaggcguug

SEQ ID NO: 1055 - RNA, 12 nt, Artificial Sequence
  Synthetic
ggcaggcguugg

SEQ ID NO: 1056 - RNA, 12 nt, Artificial Sequence
  Synthetic
gcaggcguugga

SEQ ID NO: 1057 - RNA, 12 nt, Artificial Sequence
  Synthetic
caggcguuggac

SEQ ID NO: 1058 - RNA, 12 nt, Artificial Sequence
  Synthetic
aggcguuggacu

SEQ ID NO: 1059 - RNA, 12 nt, Artificial Sequence
  Synthetic
ggcguuggacuc

SEQ ID NO: 1060 - RNA, 12 nt, Artificial Sequence
  Synthetic
gcguuggacucu

SEQ ID NO: 1061 - RNA, 12 nt, Artificial Sequence
  Synthetic
cguuggacucug

SEQ ID NO: 1062 - RNA, 12 nt, Artificial Sequence
  Synthetic
guuggacucugc

SEQ ID NO: 1063 - RNA, 12 nt, Artificial Sequence
  Synthetic
uuggacucugcc

SEQ ID NO: 1064 - RNA, 12 nt, Artificial Sequence
  Synthetic
uggacucugccu

SEQ ID NO: 1065 - RNA, 12 nt, Artificial Sequence
  Synthetic
ggacucugccug

SEQ ID NO: 1066 - RNA, 12 nt, Artificial Sequence
  Synthetic
gacucugccugu

SEQ ID NO: 1067 - RNA, 12 nt, Artificial Sequence
  Synthetic
acucugccugug

SEQ ID NO: 1068 - RNA, 12 nt, Artificial Sequence
  Synthetic
cucugccugugu

SEQ ID NO: 1069 - RNA, 12 nt, Artificial Sequence
  Synthetic
ucugccuguguc

SEQ ID NO: 1070 - RNA, 12 nt, Artificial Sequence
  Synthetic
cugccugugucg

SEQ ID NO: 1071 - RNA, 12 nt, Artificial Sequence
  Synthetic
ugccugugucgu

SEQ ID NO: 1072 - RNA, 12 nt, Artificial Sequence
  Synthetic
gccugugucgug

SEQ ID NO: 1073 - RNA, 12 nt, Artificial Sequence
  Synthetic
ccugugucgugc

SEQ ID NO: 1074 - RNA, 12 nt, Artificial Sequence
  Synthetic
cugugucgugcc

SEQ ID NO: 1075 - RNA, 12 nt, Artificial Sequence
  Synthetic
ugugucgugccc

SEQ ID NO: 1076 - RNA, 12 nt, Artificial Sequence
  Synthetic
gugucgugcccg

SEQ ID NO: 1077 - RNA, 12 nt, Artificial Sequence
  Synthetic
ugucgugcccgg

SEQ ID NO: 1078 - RNA, 12 nt, Artificial Sequence
  Synthetic
gucgugcccggc

SEQ ID NO: 1079 - RNA, 12 nt, Artificial Sequence
  Synthetic
ucgugcccggcg

SEQ ID NO: 1080 - RNA, 12 nt, Artificial Sequence
  Synthetic
cgugcccggcga

SEQ ID NO: 1081 - RNA, 12 nt, Artificial Sequence
  Synthetic
gugcccggcgac

SEQ ID NO: 1082 - RNA, 12 nt, Artificial Sequence
  Synthetic
ugcccggcgacu

SEQ ID NO: 1083 - RNA, 12 nt, Artificial Sequence
  Synthetic
gcccggcgacug

SEQ ID NO: 1084 - RNA, 12 nt, Artificial Sequence
  Synthetic
cccggcgacugc

SEQ ID NO: 1085 - RNA, 12 nt, Artificial Sequence
  Synthetic
ccggcgacugcc

SEQ ID NO: 1086 - RNA, 12 nt, Artificial Sequence
  Synthetic
cggcgacugccu

SEQ ID NO: 1087 - RNA, 12 nt, Artificial Sequence
  Synthetic
ggcgacugccug

SEQ ID NO: 1088 - RNA, 12 nt, Artificial Sequence
  Synthetic
gcgacugccugu

SEQ ID NO: 1089 - RNA, 12 nt, Artificial Sequence
  Synthetic
cgacugccugua

SEQ ID NO: 1090 - RNA, 12 nt, Artificial Sequence
  Synthetic
gacugccuguag

SEQ ID NO: 1091 - RNA, 12 nt, Artificial Sequence
  Synthetic
acugccuguagc

SEQ ID NO: 1092 - RNA, 12 nt, Artificial Sequence
  Synthetic
cugccuguagca

SEQ ID NO: 1093 - RNA, 12 nt, Artificial Sequence
  Synthetic
ugccuguagcaa

SEQ ID NO: 1094 - RNA, 12 nt, Artificial Sequence
  Synthetic
gccuguagcaac

SEQ ID NO: 1095 - RNA, 12 nt, Artificial Sequence
  Synthetic
ccuguagcaacc

SEQ ID NO: 1096 - RNA, 12 nt, Artificial Sequence
  Synthetic
cuguagcaacca

SEQ ID NO: 1097 - RNA, 12 nt, Artificial Sequence
  Synthetic
uguagcaaccau

SEQ ID NO: 1098 - RNA, 12 nt, Artificial Sequence
  Synthetic
guagcaaccauc

SEQ ID NO: 1099 - RNA, 12 nt, Artificial Sequence
  Synthetic
uagcaaccaucu

SEQ ID NO: 1100 - RNA, 12 nt, Artificial Sequence
  Synthetic
agcaaccaucuu

SEQ ID NO: 1101 - RNA, 12 nt, Artificial Sequence
  Synthetic
gcaaccaucuuc

SEQ ID NO: 1102 - RNA, 12 nt, Artificial Sequence
  Synthetic
caaccaucuuca

SEQ ID NO: 1103 - RNA, 12 nt, Artificial Sequence
  Synthetic
aaccaucuucac

SEQ ID NO: 1104 - RNA, 12 nt, Artificial Sequence
  Synthetic
accaucuucacc

SEQ ID NO: 1105 - RNA, 12 nt, Artificial Sequence
  Synthetic
ccaucuucacca

SEQ ID NO: 1106 - RNA, 12 nt, Artificial Sequence
  Synthetic
caucuucaccac

SEQ ID NO: 1107 - RNA, 12 nt, Artificial Sequence
  Synthetic
aucuucaccacc

SEQ ID NO: 1108 - RNA, 12 nt, Artificial Sequence
  Synthetic
ucuucaccaccc

SEQ ID NO: 1109 - RNA, 12 nt, Artificial Sequence
  Synthetic
cuucaccaccca

SEQ ID NO: 1110 - RNA, 12 nt, Artificial Sequence
  Synthetic
uucaccacccau

SEQ ID NO: 1111 - RNA, 12 nt, Artificial Sequence
  Synthetic
ucaccacccaug

SEQ ID NO: 1112 - RNA, 12 nt, Artificial Sequence
  Synthetic
caccacccaugc

SEQ ID NO: 1113 - RNA, 12 nt, Artificial Sequence
  Synthetic
accacccaugcc

SEQ ID NO: 1114 - RNA, 12 nt, Artificial Sequence
  Synthetic
ccacccaugcca

SEQ ID NO: 1115 - RNA, 12 nt, Artificial Sequence
  Synthetic
cacccaugccac

SEQ ID NO: 1116 - RNA, 12 nt, Artificial Sequence
  Synthetic
acccaugccacg

SEQ ID NO: 1117 - RNA, 12 nt, Artificial Sequence
  Synthetic
cccaugccacgc

SEQ ID NO: 1118 - RNA, 12 nt, Artificial Sequence
  Synthetic
ccaugccacgcu

SEQ ID NO: 1119 - RNA, 12 nt, Artificial Sequence
  Synthetic
caugccacgcug

SEQ ID NO: 1120 - RNA, 12 nt, Artificial Sequence
  Synthetic
augccacgcugc

SEQ ID NO: 1121 - RNA, 12 nt, Artificial Sequence
  Synthetic
ugccacgcugcu

SEQ ID NO: 1122 - RNA, 12 nt, Artificial Sequence
  Synthetic
gccacgcugcug

SEQ ID NO: 1123 - RNA, 12 nt, Artificial Sequence
  Synthetic
ccacgcugcugg

SEQ ID NO: 1124 - RNA, 12 nt, Artificial Sequence
  Synthetic
cacgcugcuggg

SEQ ID NO: 1125 - RNA, 12 nt, Artificial Sequence
  Synthetic
acgcugcugggg

SEQ ID NO: 1126 - RNA, 12 nt, Artificial Sequence
  Synthetic
cgcugcuggggc

SEQ ID NO: 1127 - RNA, 12 nt, Artificial Sequence
  Synthetic
gcugcuggggcg

SEQ ID NO: 1128 - RNA, 12 nt, Artificial Sequence
  Synthetic
cugcuggggcgc

SEQ ID NO: 1129 - RNA, 12 nt, Artificial Sequence
  Synthetic
ugcuggggcgcu

SEQ ID NO: 1130 - RNA, 12 nt, Artificial Sequence
  Synthetic
gcuggggcgcua

SEQ ID NO: 1131 - RNA, 12 nt, Artificial Sequence
  Synthetic
cuggggcgcuac

SEQ ID NO: 1132 - RNA, 12 nt, Artificial Sequence
  Synthetic
uggggcgcuacc

SEQ ID NO: 1133 - RNA, 12 nt, Artificial Sequence
  Synthetic
ggggcgcuaccu

SEQ ID NO: 1134 - RNA, 12 nt, Artificial Sequence
  Synthetic
gggcgcuaccug

SEQ ID NO: 1135 - RNA, 12 nt, Artificial Sequence
  Synthetic
ggcgcuaccugu

SEQ ID NO: 1136 - RNA, 12 nt, Artificial Sequence
  Synthetic
gcgcuaccugug

SEQ ID NO: 1137 - RNA, 12 nt, Artificial Sequence
  Synthetic
cgcuaccugugu

SEQ ID NO: 1138 - RNA, 12 nt, Artificial Sequence
  Synthetic
gcuaccugugug

SEQ ID NO: 1139 - RNA, 12 nt, Artificial Sequence
  Synthetic
cuaccugugugc

SEQ ID NO: 1140 - RNA, 12 nt, Artificial Sequence
  Synthetic
uaccugugugcc

SEQ ID NO: 1141 - RNA, 12 nt, Artificial Sequence
  Synthetic
accugugugccg

SEQ ID NO: 1142 - RNA, 12 nt, Artificial Sequence
  Synthetic
ccugugugccgg

SEQ ID NO: 1143 - RNA, 12 nt, Artificial Sequence
  Synthetic
cugugugccggu

SEQ ID NO: 1144 - RNA, 12 nt, Artificial Sequence
  Synthetic
ugugugccggug

SEQ ID NO: 1145 - RNA, 12 nt, Artificial Sequence
  Synthetic
gugugccggugc

SEQ ID NO: 1146 - RNA, 12 nt, Artificial Sequence
  Synthetic
ugugccggugcc

SEQ ID NO: 1147 - RNA, 12 nt, Artificial Sequence
  Synthetic
gugccggugccg

SEQ ID NO: 1148 - RNA, 12 nt, Artificial Sequence
  Synthetic
ugccggugccgu

SEQ ID NO: 1149 - RNA, 12 nt, Artificial Sequence
  Synthetic
gccggugccgug

SEQ ID NO: 1150 - RNA, 12 nt, Artificial Sequence
  Synthetic
ccggugccgugg

SEQ ID NO: 1151 - RNA, 12 nt, Artificial Sequence
  Synthetic
cggugccgugga

SEQ ID NO: 1152 - RNA, 12 nt, Artificial Sequence
  Synthetic
ggugccguggac

SEQ ID NO: 1153 - RNA, 12 nt, Artificial Sequence
  Synthetic
gugccguggacu

SEQ ID NO: 1154 - RNA, 12 nt, Artificial Sequence
  Synthetic
ugccguggacuu

SEQ ID NO: 1155 - RNA, 12 nt, Artificial Sequence
  Synthetic
gccguggacuuc

SEQ ID NO: 1156 - RNA, 12 nt, Artificial Sequence
  Synthetic
ccguggacuucu

SEQ ID NO: 1157 - RNA, 12 nt, Artificial Sequence
  Synthetic
cguggacuucua

SEQ ID NO: 1158 - RNA, 12 nt, Artificial Sequence
  Synthetic
guggacuucuac

SEQ ID NO: 1159 - RNA, 12 nt, Artificial Sequence
  Synthetic
uggacuucuaca

SEQ ID NO: 1160 - RNA, 12 nt, Artificial Sequence
  Synthetic
ggacuucuacaa

SEQ ID NO: 1161 - RNA, 12 nt, Artificial Sequence
  Synthetic
gacuucuacaac

SEQ ID NO: 1162 - RNA, 12 nt, Artificial Sequence
  Synthetic
acuucuacaaca

SEQ ID NO: 1163 - RNA, 12 nt, Artificial Sequence
  Synthetic
cuucuacaacaa

SEQ ID NO: 1164 - RNA, 12 nt, Artificial Sequence
  Synthetic
uucuacaacaac

SEQ ID NO: 1165 - RNA, 12 nt, Artificial Sequence
  Synthetic
ucuacaacaacc

SEQ ID NO: 1166 - RNA, 12 nt, Artificial Sequence
  Synthetic
cuacaacaaccu

SEQ ID NO: 1167 - RNA, 12 nt, Artificial Sequence
  Synthetic
uacaacaaccug

SEQ ID NO: 1168 - RNA, 12 nt, Artificial Sequence
  Synthetic
acaacaaccugg

SEQ ID NO: 1169 - RNA, 12 nt, Artificial Sequence
  Synthetic
caacaaccugga

SEQ ID NO: 1170 - RNA, 12 nt, Artificial Sequence
  Synthetic
aacaaccuggag

SEQ ID NO: 1171 - RNA, 12 nt, Artificial Sequence
  Synthetic
acaaccuggaga

SEQ ID NO: 1172 - RNA, 12 nt, Artificial Sequence
  Synthetic
caaccuggagaa

SEQ ID NO: 1173 - RNA, 12 nt, Artificial Sequence
  Synthetic
aaccuggagaac

SEQ ID NO: 1174 - RNA, 12 nt, Artificial Sequence
  Synthetic
accuggagaacu

SEQ ID NO: 1175 - RNA, 12 nt, Artificial Sequence
  Synthetic
ccuggagaacuu

SEQ ID NO: 1176 - RNA, 12 nt, Artificial Sequence
  Synthetic
cuggagaacuuc

SEQ ID NO: 1177 - RNA, 12 nt, Artificial Sequence
  Synthetic
uggagaacuuca

SEQ ID NO: 1178 - RNA, 12 nt, Artificial Sequence
  Synthetic
ggagaacuucaa

SEQ ID NO: 1179 - RNA, 12 nt, Artificial Sequence
  Synthetic
gagaacuucaac

SEQ ID NO: 1180 - RNA, 12 nt, Artificial Sequence
  Synthetic
agaacuucaacg

SEQ ID NO: 1181 - RNA, 12 nt, Artificial Sequence
  Synthetic
gaacuucaacgu

SEQ ID NO: 1182 - RNA, 12 nt, Artificial Sequence
  Synthetic
aacuucaacgug

SEQ ID NO: 1183 - RNA, 12 nt, Artificial Sequence
  Synthetic
acuucaacgugg

SEQ ID NO: 1184 - RNA, 12 nt, Artificial Sequence
  Synthetic
cuucaacgugga

SEQ ID NO: 1185 - RNA, 12 nt, Artificial Sequence
  Synthetic
uucaacguggac

SEQ ID NO: 1186 - RNA, 12 nt, Artificial Sequence
  Synthetic
ucaacguggaca

SEQ ID NO: 1187 - RNA, 12 nt, Artificial Sequence
  Synthetic
caacguggacaa

SEQ ID NO: 1188 - RNA, 12 nt, Artificial Sequence
  Synthetic
aacguggacaag

SEQ ID NO: 1189 - RNA, 12 nt, Artificial Sequence
  Synthetic
acguggacaagg

SEQ ID NO: 1190 - RNA, 12 nt, Artificial Sequence
  Synthetic
cguggacaagga

SEQ ID NO: 1191 - RNA, 12 nt, Artificial Sequence
  Synthetic
guggacaaggaa

SEQ ID NO: 1192 - RNA, 12 nt, Artificial Sequence
  Synthetic
uggacaaggaag

SEQ ID NO: 1193 - RNA, 12 nt, Artificial Sequence
  Synthetic
ggacaaggaagc

SEQ ID NO: 1194 - RNA, 12 nt, Artificial Sequence
  Synthetic
gacaaggaagca

SEQ ID NO: 1195 - RNA, 12 nt, Artificial Sequence
  Synthetic
acaaggaagcag

SEQ ID NO: 1196 - RNA, 12 nt, Artificial Sequence
  Synthetic
caaggaagcagg

SEQ ID NO: 1197 - RNA, 12 nt, Artificial Sequence
  Synthetic
aaggaagcaggg

SEQ ID NO: 1198 - RNA, 12 nt, Artificial Sequence
  Synthetic
aggaagcagggg

SEQ ID NO: 1199 - RNA, 12 nt, Artificial Sequence
  Synthetic
ggaagcagggga

SEQ ID NO: 1200 - RNA, 12 nt, Artificial Sequence
  Synthetic
gaagcaggggag

SEQ ID NO: 1201 - RNA, 12 nt, Artificial Sequence
  Synthetic
aagcaggggaga

SEQ ID NO: 1202 - RNA, 12 nt, Artificial Sequence
  Synthetic
agcaggggagag

SEQ ID NO: 1203 - RNA, 12 nt, Artificial Sequence
  Synthetic
gcaggggagagg

SEQ ID NO: 1204 - RNA, 12 nt, Artificial Sequence
  Synthetic
caggggagaggc

SEQ ID NO: 1205 - RNA, 12 nt, Artificial Sequence
  Synthetic
aggggagaggca

SEQ ID NO: 1206 - RNA, 12 nt, Artificial Sequence
  Synthetic
ggggagaggcag

SEQ ID NO: 1207 - RNA, 12 nt, Artificial Sequence
  Synthetic
gggagaggcaga

SEQ ID NO: 1208 - RNA, 12 nt, Artificial Sequence
  Synthetic
ggagaggcagau

SEQ ID NO: 1209 - RNA, 12 nt, Artificial Sequence
  Synthetic
gagaggcagauc

SEQ ID NO: 1210 - RNA, 12 nt, Artificial Sequence
  Synthetic
agaggcagaucu

SEQ ID NO: 1211 - RNA, 12 nt, Artificial Sequence
  Synthetic
gaggcagaucua

SEQ ID NO: 1212 - RNA, 12 nt, Artificial Sequence
  Synthetic
aggcagaucuac

SEQ ID NO: 1213 - RNA, 12 nt, Artificial Sequence
  Synthetic
ggcagaucuacc

SEQ ID NO: 1214 - RNA, 12 nt, Artificial Sequence
  Synthetic
gcagaucuacca

SEQ ID NO: 1215 - RNA, 12 nt, Artificial Sequence
  Synthetic
cagaucuaccac

SEQ ID NO: 1216 - RNA, 12 nt, Artificial Sequence
  Synthetic
agaucuaccacc

SEQ ID NO: 1217 - RNA, 12 nt, Artificial Sequence
  Synthetic
gaucuaccaccg

SEQ ID NO: 1218 - RNA, 12 nt, Artificial Sequence
  Synthetic
aucuaccaccga

SEQ ID NO: 1219 - RNA, 12 nt, Artificial Sequence
  Synthetic
ucuaccaccgau

SEQ ID NO: 1220 - RNA, 12 nt, Artificial Sequence
  Synthetic
cuaccaccgaua

SEQ ID NO: 1221 - RNA, 12 nt, Artificial Sequence
  Synthetic
uaccaccgauac

SEQ ID NO: 1222 - RNA, 12 nt, Artificial Sequence
  Synthetic
accaccgauacu

SEQ ID NO: 1223 - RNA, 12 nt, Artificial Sequence
  Synthetic
ccaccgauacug

SEQ ID NO: 1224 - RNA, 12 nt, Artificial Sequence
  Synthetic
caccgauacugc

SEQ ID NO: 1225 - RNA, 12 nt, Artificial Sequence
  Synthetic
accgauacugca

SEQ ID NO: 1226 - RNA, 12 nt, Artificial Sequence
  Synthetic
ccgauacugcau

SEQ ID NO: 1227 - RNA, 12 nt, Artificial Sequence
  Synthetic
cgauacugcaug

SEQ ID NO: 1228 - RNA, 12 nt, Artificial Sequence
  Synthetic
gauacugcaugg

SEQ ID NO: 1229 - RNA, 12 nt, Artificial Sequence
  Synthetic
auacugcaugga

SEQ ID NO: 1230 - RNA, 12 nt, Artificial Sequence
  Synthetic
uacugcauggaa

SEQ ID NO: 1231 - RNA, 12 nt, Artificial Sequence
  Synthetic
acugcauggaaa

SEQ ID NO: 1232 - RNA, 12 nt, Artificial Sequence
  Synthetic
cugcauggaaag

SEQ ID NO: 1233 - RNA, 12 nt, Artificial Sequence
  Synthetic
ugcauggaaagg

SEQ ID NO: 1234 - RNA, 12 nt, Artificial Sequence
  Synthetic
gcauggaaaggg

SEQ ID NO: 1235 - RNA, 12 nt, Artificial Sequence
  Synthetic
cauggaaagggc

SEQ ID NO: 1236 - RNA, 12 nt, Artificial Sequence
  Synthetic
auggaaagggcg

SEQ ID NO: 1237 - RNA, 12 nt, Artificial Sequence
  Synthetic
uggaaagggcgg

SEQ ID NO: 1238 - RNA, 12 nt, Artificial Sequence
  Synthetic
ggaaagggcggc

SEQ ID NO: 1239 - RNA, 12 nt, Artificial Sequence
  Synthetic
gaaagggcggca

SEQ ID NO: 1240 - RNA, 12 nt, Artificial Sequence
  Synthetic
aaagggcggcag

SEQ ID NO: 1241 - RNA, 12 nt, Artificial Sequence
  Synthetic
aagggcggcagc

SEQ ID NO: 1242 - RNA, 12 nt, Artificial Sequence
  Synthetic
agggcggcagcc

SEQ ID NO: 1243 - RNA, 12 nt, Artificial Sequence
  Synthetic
gggcggcagccc

SEQ ID NO: 1244 - RNA, 12 nt, Artificial Sequence
  Synthetic
ggcggcagccca

SEQ ID NO: 1245 - RNA, 12 nt, Artificial Sequence
  Synthetic
gcggcagcccac

SEQ ID NO: 1246 - RNA, 12 nt, Artificial Sequence
  Synthetic
cggcagcccacu

SEQ ID NO: 1247 - RNA, 12 nt, Artificial Sequence
  Synthetic
ggcagcccacug

SEQ ID NO: 1248 - RNA, 12 nt, Artificial Sequence
  Synthetic
gcagcccacugc

SEQ ID NO: 1249 - RNA, 12 nt, Artificial Sequence
  Synthetic
cagcccacugcg

SEQ ID NO: 1250 - RNA, 12 nt, Artificial Sequence
  Synthetic
agcccacugcgc

SEQ ID NO: 1251 - RNA, 12 nt, Artificial Sequence
  Synthetic
gcccacugcgcu

SEQ ID NO: 1252 - RNA, 12 nt, Artificial Sequence
  Synthetic
cccacugcgcuc

SEQ ID NO: 1253 - RNA, 12 nt, Artificial Sequence
  Synthetic
ccacugcgcuca

SEQ ID NO: 1254 - RNA, 12 nt, Artificial Sequence
  Synthetic
cacugcgcucac

SEQ ID NO: 1255 - RNA, 12 nt, Artificial Sequence
  Synthetic
acugcgcucacg

SEQ ID NO: 1256 - RNA, 12 nt, Artificial Sequence
  Synthetic
cugcgcucacgu

SEQ ID NO: 1257 - RNA, 12 nt, Artificial Sequence
  Synthetic
ugcgcucacguc

SEQ ID NO: 1258 - RNA, 12 nt, Artificial Sequence
  Synthetic
gcgcucacgucu

SEQ ID NO: 1259 - RNA, 12 nt, Artificial Sequence
  Synthetic
cgcucacgucuu

SEQ ID NO: 1260 - RNA, 12 nt, Artificial Sequence
  Synthetic
gcucacgucuuc

SEQ ID NO: 1261 - RNA, 12 nt, Artificial Sequence
  Synthetic
cucacgucuuca

SEQ ID NO: 1262 - RNA, 12 nt, Artificial Sequence
  Synthetic
ucacgucuucac

SEQ ID NO: 1263 - RNA, 12 nt, Artificial Sequence
  Synthetic
cacgucuucacu

SEQ ID NO: 1264 - RNA, 12 nt, Artificial Sequence
  Synthetic
acgucuucacua

SEQ ID NO: 1265 - RNA, 12 nt, Artificial Sequence
  Synthetic
cgucuucacuac

SEQ ID NO: 1266 - RNA, 12 nt, Artificial Sequence
  Synthetic
gucuucacuacu

SEQ ID NO: 1267 - RNA, 12 nt, Artificial Sequence
  Synthetic
ucuucacuacug

SEQ ID NO: 1268 - RNA, 12 nt, Artificial Sequence
  Synthetic
cuucacuacugu

SEQ ID NO: 1269 - RNA, 12 nt, Artificial Sequence
  Synthetic
uucacuacugug

SEQ ID NO: 1270 - RNA, 12 nt, Artificial Sequence
  Synthetic
ucacuacugugu

SEQ ID NO: 1271 - RNA, 12 nt, Artificial Sequence
  Synthetic
cacuacuguguc

SEQ ID NO: 1272 - RNA, 12 nt, Artificial Sequence
  Synthetic
acuacugugucc

SEQ ID NO: 1273 - RNA, 12 nt, Artificial Sequence
  Synthetic
cuacuguguccc

SEQ ID NO: 1274 - RNA, 12 nt, Artificial Sequence
  Synthetic
uacuguguccca

SEQ ID NO: 1275 - RNA, 12 nt, Artificial Sequence
  Synthetic
acugugucccag

SEQ ID NO: 1276 - RNA, 12 nt, Artificial Sequence
  Synthetic
cugugucccaga

SEQ ID NO: 1277 - RNA, 12 nt, Artificial Sequence
  Synthetic
ugugucccagau

SEQ ID NO: 1278 - RNA, 12 nt, Artificial Sequence
  Synthetic
gugucccagauc

SEQ ID NO: 1279 - RNA, 12 nt, Artificial Sequence
  Synthetic
ugucccagauca

SEQ ID NO: 1280 - RNA, 12 nt, Artificial Sequence
  Synthetic
gucccagaucac

SEQ ID NO: 1281 - RNA, 12 nt, Artificial Sequence
  Synthetic
ucccagaucacc

SEQ ID NO: 1282 - RNA, 12 nt, Artificial Sequence
  Synthetic
cccagaucaccg

SEQ ID NO: 1283 - RNA, 12 nt, Artificial Sequence
  Synthetic
ccagaucaccgc

SEQ ID NO: 1284 - RNA, 12 nt, Artificial Sequence
  Synthetic
cagaucaccgcc

SEQ ID NO: 1285 - RNA, 12 nt, Artificial Sequence
  Synthetic
agaucaccgcca

SEQ ID NO: 1286 - RNA, 12 nt, Artificial Sequence
  Synthetic
gaucaccgccau

SEQ ID NO: 1287 - RNA, 12 nt, Artificial Sequence
  Synthetic
aucaccgccauc

SEQ ID NO: 1288 - RNA, 12 nt, Artificial Sequence
  Synthetic
ucaccgccaucg

SEQ ID NO: 1289 - RNA, 12 nt, Artificial Sequence
  Synthetic
caccgccaucga

SEQ ID NO: 1290 - RNA, 12 nt, Artificial Sequence
  Synthetic
accgccaucgag

SEQ ID NO: 1291 - RNA, 12 nt, Artificial Sequence
  Synthetic
ccgccaucgagg

SEQ ID NO: 1292 - RNA, 12 nt, Artificial Sequence
  Synthetic
cgccaucgaggc

SEQ ID NO: 1293 - RNA, 12 nt, Artificial Sequence
  Synthetic
gccaucgaggca

SEQ ID NO: 1294 - RNA, 12 nt, Artificial Sequence
  Synthetic
ccaucgaggcac

SEQ ID NO: 1295 - RNA, 12 nt, Artificial Sequence
  Synthetic
caucgaggcaca

SEQ ID NO: 1296 - RNA, 12 nt, Artificial Sequence
  Synthetic
aucgaggcacag

SEQ ID NO: 1297 - RNA, 12 nt, Artificial Sequence
  Synthetic
ucgaggcacagc

SEQ ID NO: 1298 - RNA, 12 nt, Artificial Sequence
  Synthetic
cgaggcacagca

SEQ ID NO: 1299 - RNA, 12 nt, Artificial Sequence
  Synthetic
gaggcacagcac

SEQ ID NO: 1300 - RNA, 12 nt, Artificial Sequence
  Synthetic
aggcacagcacu

SEQ ID NO: 1301 - RNA, 12 nt, Artificial Sequence
  Synthetic
ggcacagcacuu

SEQ ID NO: 1302 - RNA, 12 nt, Artificial Sequence
  Synthetic
gcacagcacuug

SEQ ID NO: 1303 - RNA, 12 nt, Artificial Sequence
  Synthetic
cacagcacuugc

SEQ ID NO: 1304 - RNA, 12 nt, Artificial Sequence
  Synthetic
acagcacuugcu

SEQ ID NO: 1305 - RNA, 12 nt, Artificial Sequence
  Synthetic
cagcacuugcuc

SEQ ID NO: 1306 - RNA, 12 nt, Artificial Sequence
  Synthetic
agcacuugcuca

SEQ ID NO: 1307 - RNA, 12 nt, Artificial Sequence
  Synthetic
gcacuugcucaa

SEQ ID NO: 1308 - RNA, 12 nt, Artificial Sequence
  Synthetic
cacuugcucaag

SEQ ID NO: 1309 - RNA, 12 nt, Artificial Sequence
  Synthetic
acuugcucaaga

SEQ ID NO: 1310 - RNA, 12 nt, Artificial Sequence
  Synthetic
cuugcucaagag

SEQ ID NO: 1311 - RNA, 12 nt, Artificial Sequence
  Synthetic
uugcucaagagg

SEQ ID NO: 1312 - RNA, 12 nt, Artificial Sequence
  Synthetic
ugcucaagagga

SEQ ID NO: 1313 - RNA, 12 nt, Artificial Sequence
  Synthetic
gcucaagaggaa

SEQ ID NO: 1314 - RNA, 12 nt, Artificial Sequence
  Synthetic
cucaagaggaaa

SEQ ID NO: 1315 - RNA, 12 nt, Artificial Sequence
  Synthetic
ucaagaggaaac

SEQ ID NO: 1316 - RNA, 12 nt, Artificial Sequence
  Synthetic
caagaggaaacc

SEQ ID NO: 1317 - RNA, 12 nt, Artificial Sequence
  Synthetic
aagaggaaacca

SEQ ID NO: 1318 - RNA, 12 nt, Artificial Sequence
  Synthetic
agaggaaaccag

SEQ ID NO: 1319 - RNA, 12 nt, Artificial Sequence
  Synthetic
gaggaaaccaga

SEQ ID NO: 1320 - RNA, 12 nt, Artificial Sequence
  Synthetic
aggaaaccagau

SEQ ID NO: 1321 - RNA, 12 nt, Artificial Sequence
  Synthetic
ggaaaccagaua

SEQ ID NO: 1322 - RNA, 12 nt, Artificial Sequence
  Synthetic
gaaaccagauau

SEQ ID NO: 1323 - RNA, 12 nt, Artificial Sequence
  Synthetic
aaaccagauauu

SEQ ID NO: 1324 - RNA, 12 nt, Artificial Sequence
  Synthetic
aaccagauauug

SEQ ID NO: 1325 - RNA, 12 nt, Artificial Sequence
  Synthetic
accagauauugu

SEQ ID NO: 1326 - RNA, 12 nt, Artificial Sequence
  Synthetic
ccagauauugug

SEQ ID NO: 1327 - RNA, 12 nt, Artificial Sequence
  Synthetic
cagauauuguga

SEQ ID NO: 1328 - RNA, 12 nt, Artificial Sequence
  Synthetic
agauauugugac

SEQ ID NO: 1329 - RNA, 12 nt, Artificial Sequence
  Synthetic
gauauugugacc

SEQ ID NO: 1330 - RNA, 12 nt, Artificial Sequence
  Synthetic
auauugugaccc

SEQ ID NO: 1331 - RNA, 12 nt, Artificial Sequence
  Synthetic
uauugugacccc

SEQ ID NO: 1332 - RNA, 12 nt, Artificial Sequence
  Synthetic
auugugaccccc

SEQ ID NO: 1333 - RNA, 12 nt, Artificial Sequence
  Synthetic
uugugaccccca

SEQ ID NO: 1334 - RNA, 12 nt, Artificial Sequence
  Synthetic
ugugacccccaa

SEQ ID NO: 1335 - RNA, 12 nt, Artificial Sequence
  Synthetic
gugacccccaau

SEQ ID NO: 1336 - RNA, 12 nt, Artificial Sequence
  Synthetic
ugacccccaaug

SEQ ID NO: 1337 - RNA, 12 nt, Artificial Sequence
  Synthetic
gacccccaaugg

SEQ ID NO: 1338 - RNA, 12 nt, Artificial Sequence
  Synthetic
acccccaauggg

SEQ ID NO: 1339 - RNA, 12 nt, Artificial Sequence
  Synthetic
cccccaaugggc

SEQ ID NO: 1340 - RNA, 12 nt, Artificial Sequence
  Synthetic
ccccaaugggcu

SEQ ID NO: 1341 - RNA, 12 nt, Artificial Sequence
  Synthetic
cccaaugggcug

SEQ ID NO: 1342 - RNA, 12 nt, Artificial Sequence
  Synthetic
ccaaugggcuga

SEQ ID NO: 1343 - RNA, 12 nt, Artificial Sequence
  Synthetic
caaugggcugaa

SEQ ID NO: 1344 - RNA, 12 nt, Artificial Sequence
  Synthetic
aaugggcugaau

SEQ ID NO: 1345 - RNA, 12 nt, Artificial Sequence
  Synthetic
augggcugaaug

SEQ ID NO: 1346 - RNA, 12 nt, Artificial Sequence
  Synthetic
ugggcugaaugu

SEQ ID NO: 1347 - RNA, 12 nt, Artificial Sequence
  Synthetic
gggcugaaugug

SEQ ID NO: 1348 - RNA, 12 nt, Artificial Sequence
  Synthetic
ggcugaauguga

SEQ ID NO: 1349 - RNA, 12 nt, Artificial Sequence
  Synthetic
gcugaaugugaa

SEQ ID NO: 1350 - RNA, 12 nt, Artificial Sequence
  Synthetic
cugaaugugaag

SEQ ID NO: 1351 - RNA, 12 nt, Artificial Sequence
  Synthetic
ugaaugugaaga

SEQ ID NO: 1352 - RNA, 12 nt, Artificial Sequence
  Synthetic
gaaugugaagaa

SEQ ID NO: 1353 - RNA, 12 nt, Artificial Sequence
  Synthetic
aaugugaagaag

SEQ ID NO: 1354 - RNA, 12 nt, Artificial Sequence
  Synthetic
augugaagaagu

SEQ ID NO: 1355 - RNA, 12 nt, Artificial Sequence
  Synthetic
ugugaagaaguu

SEQ ID NO: 1356 - RNA, 12 nt, Artificial Sequence
  Synthetic
gugaagaaguuu

SEQ ID NO: 1357 - RNA, 12 nt, Artificial Sequence
  Synthetic
ugaagaaguuuu

SEQ ID NO: 1358 - RNA, 12 nt, Artificial Sequence
  Synthetic
gaagaaguuuuc

SEQ ID NO: 1359 - RNA, 12 nt, Artificial Sequence
  Synthetic
aagaaguuuucu

SEQ ID NO: 1360 - RNA, 12 nt, Artificial Sequence
  Synthetic
agaaguuuucug

SEQ ID NO: 1361 - RNA, 12 nt, Artificial Sequence
  Synthetic
gaaguuuucugc

SEQ ID NO: 1362 - RNA, 12 nt, Artificial Sequence
  Synthetic
aaguuuucugcc

SEQ ID NO: 1363 - RNA, 12 nt, Artificial Sequence
  Synthetic
aguuuucugcca

SEQ ID NO: 1364 - RNA, 12 nt, Artificial Sequence
  Synthetic
guuuucugccau

SEQ ID NO: 1365 - RNA, 12 nt, Artificial Sequence
  Synthetic
uuuucugccaug

SEQ ID NO: 1366 - RNA, 12 nt, Artificial Sequence
  Synthetic
uuucugccaugc

SEQ ID NO: 1367 - RNA, 12 nt, Artificial Sequence
  Synthetic
uucugccaugca

SEQ ID NO: 1368 - RNA, 12 nt, Artificial Sequence
  Synthetic
ucugccaugcau

SEQ ID NO: 1369 - RNA, 12 nt, Artificial Sequence
  Synthetic
cugccaugcaug

SEQ ID NO: 1370 - RNA, 12 nt, Artificial Sequence
  Synthetic
ugccaugcauga

SEQ ID NO: 1371 - RNA, 12 nt, Artificial Sequence
  Synthetic
gccaugcaugag

SEQ ID NO: 1372 - RNA, 12 nt, Artificial Sequence
  Synthetic
ccaugcaugagu

SEQ ID NO: 1373 - RNA, 12 nt, Artificial Sequence
  Synthetic
caugcaugaguu

SEQ ID NO: 1374 - RNA, 12 nt, Artificial Sequence
  Synthetic
augcaugaguuc

SEQ ID NO: 1375 - RNA, 12 nt, Artificial Sequence
  Synthetic
ugcaugaguucc

SEQ ID NO: 1376 - RNA, 12 nt, Artificial Sequence
  Synthetic
gcaugaguucca

SEQ ID NO: 1377 - RNA, 12 nt, Artificial Sequence
  Synthetic
caugaguuccag

SEQ ID NO: 1378 - RNA, 12 nt, Artificial Sequence
  Synthetic
augaguuccaga

SEQ ID NO: 1379 - RNA, 12 nt, Artificial Sequence
  Synthetic
ugaguuccagaa

SEQ ID NO: 1380 - RNA, 12 nt, Artificial Sequence
  Synthetic
gaguuccagaac

SEQ ID NO: 1381 - RNA, 12 nt, Artificial Sequence
  Synthetic
aguuccagaacc

SEQ ID NO: 1382 - RNA, 12 nt, Artificial Sequence
  Synthetic
guuccagaaccu

SEQ ID NO: 1383 - RNA, 12 nt, Artificial Sequence
  Synthetic
uuccagaaccuc

SEQ ID NO: 1384 - RNA, 12 nt, Artificial Sequence
  Synthetic
uccagaaccucc

SEQ ID NO: 1385 - RNA, 12 nt, Artificial Sequence
  Synthetic
ccagaaccucca

SEQ ID NO: 1386 - RNA, 12 nt, Artificial Sequence
  Synthetic
cagaaccuccau

SEQ ID NO: 1387 - RNA, 12 nt, Artificial Sequence
  Synthetic
agaaccuccaug

SEQ ID NO: 1388 - RNA, 12 nt, Artificial Sequence
  Synthetic
gaaccuccaugc

SEQ ID NO: 1389 - RNA, 12 nt, Artificial Sequence
  Synthetic
aaccuccaugcu

SEQ ID NO: 1390 - RNA, 12 nt, Artificial Sequence
  Synthetic
accuccaugcuc

SEQ ID NO: 1391 - RNA, 12 nt, Artificial Sequence
  Synthetic
ccuccaugcuca

SEQ ID NO: 1392 - RNA, 12 nt, Artificial Sequence
  Synthetic
cuccaugcucag

SEQ ID NO: 1393 - RNA, 12 nt, Artificial Sequence
  Synthetic
uccaugcucaga

SEQ ID NO: 1394 - RNA, 12 nt, Artificial Sequence
  Synthetic
ccaugcucagag

SEQ ID NO: 1395 - RNA, 12 nt, Artificial Sequence
  Synthetic
caugcucagagc

SEQ ID NO: 1396 - RNA, 12 nt, Artificial Sequence
  Synthetic
augcucagagca

SEQ ID NO: 1397 - RNA, 12 nt, Artificial Sequence
  Synthetic
ugcucagagcaa

SEQ ID NO: 1398 - RNA, 12 nt, Artificial Sequence
  Synthetic
gcucagagcaag

SEQ ID NO: 1399 - RNA, 12 nt, Artificial Sequence
  Synthetic
cucagagcaagg

SEQ ID NO: 1400 - RNA, 12 nt, Artificial Sequence
  Synthetic
ucagagcaaggc

SEQ ID NO: 1401 - RNA, 12 nt, Artificial Sequence
  Synthetic
cagagcaaggcu

SEQ ID NO: 1402 - RNA, 12 nt, Artificial Sequence
  Synthetic
agagcaaggcuc

SEQ ID NO: 1403 - RNA, 12 nt, Artificial Sequence
  Synthetic
gagcaaggcucg

SEQ ID NO: 1404 - RNA, 12 nt, Artificial Sequence
  Synthetic
agcaaggcucga

SEQ ID NO: 1405 - RNA, 12 nt, Artificial Sequence
  Synthetic
gcaaggcucgaa

SEQ ID NO: 1406 - RNA, 12 nt, Artificial Sequence
  Synthetic
caaggcucgaau

SEQ ID NO: 1407 - RNA, 12 nt, Artificial Sequence
  Synthetic
aaggcucgaauc

SEQ ID NO: 1408 - RNA, 12 nt, Artificial Sequence
  Synthetic
aggcucgaaucc

SEQ ID NO: 1409 - RNA, 12 nt, Artificial Sequence
  Synthetic
ggcucgaaucca

SEQ ID NO: 1410 - RNA, 12 nt, Artificial Sequence
  Synthetic
gcucgaauccag

SEQ ID NO: 1411 - RNA, 12 nt, Artificial Sequence
  Synthetic
cucgaauccagg

SEQ ID NO: 1412 - RNA, 12 nt, Artificial Sequence
  Synthetic
ucgaauccagga

SEQ ID NO: 1413 - RNA, 12 nt, Artificial Sequence
  Synthetic
cgaauccaggag

SEQ ID NO: 1414 - RNA, 12 nt, Artificial Sequence
  Synthetic
gaauccaggagu

SEQ ID NO: 1415 - RNA, 12 nt, Artificial Sequence
  Synthetic
aauccaggaguu

SEQ ID NO: 1416 - RNA, 12 nt, Artificial Sequence
  Synthetic
auccaggaguuu

SEQ ID NO: 1417 - RNA, 12 nt, Artificial Sequence
  Synthetic
uccaggaguuug

SEQ ID NO: 1418 - RNA, 12 nt, Artificial Sequence
  Synthetic
ccaggaguuugu

SEQ ID NO: 1419 - RNA, 12 nt, Artificial Sequence
  Synthetic
caggaguuugug

SEQ ID NO: 1420 - RNA, 12 nt, Artificial Sequence
  Synthetic
aggaguuugugc

SEQ ID NO: 1421 - RNA, 12 nt, Artificial Sequence
  Synthetic
ggaguuugugcg

SEQ ID NO: 1422 - RNA, 12 nt, Artificial Sequence
  Synthetic
gaguuugugcgg

SEQ ID NO: 1423 - RNA, 12 nt, Artificial Sequence
  Synthetic
aguuugugcggg

SEQ ID NO: 1424 - RNA, 12 nt, Artificial Sequence
  Synthetic
guuugugcgggg

SEQ ID NO: 1425 - RNA, 12 nt, Artificial Sequence
  Synthetic
uuugugcggggc

SEQ ID NO: 1426 - RNA, 12 nt, Artificial Sequence
  Synthetic
uugugcggggcc

SEQ ID NO: 1427 - RNA, 12 nt, Artificial Sequence
  Synthetic
ugugcggggcca

SEQ ID NO: 1428 - RNA, 12 nt, Artificial Sequence
  Synthetic
gugcggggccau

SEQ ID NO: 1429 - RNA, 12 nt, Artificial Sequence
  Synthetic
ugcggggccauu

SEQ ID NO: 1430 - RNA, 12 nt, Artificial Sequence
  Synthetic
gcggggccauuu

SEQ ID NO: 1431 - RNA, 12 nt, Artificial Sequence
  Synthetic
cggggccauuuu

SEQ ID NO: 1432 - RNA, 12 nt, Artificial Sequence
  Synthetic
ggggccauuuuu

SEQ ID NO: 1433 - RNA, 12 nt, Artificial Sequence
  Synthetic
gggccauuuuua

SEQ ID NO: 1434 - RNA, 12 nt, Artificial Sequence
  Synthetic
ggccauuuuuau

SEQ ID NO: 1435 - RNA, 12 nt, Artificial Sequence
  Synthetic
gccauuuuuaug

SEQ ID NO: 1436 - RNA, 12 nt, Artificial Sequence
  Synthetic
ccauuuuuaugg

SEQ ID NO: 1437 - RNA, 12 nt, Artificial Sequence
  Synthetic
cauuuuuauggg

SEQ ID NO: 1438 - RNA, 12 nt, Artificial Sequence
  Synthetic
auuuuuaugggc

SEQ ID NO: 1439 - RNA, 12 nt, Artificial Sequence
  Synthetic
uuuuuaugggca

SEQ ID NO: 1440 - RNA, 12 nt, Artificial Sequence
  Synthetic
uuuuaugggcau

SEQ ID NO: 1441 - RNA, 12 nt, Artificial Sequence
  Synthetic
uuuaugggcauc

SEQ ID NO: 1442 - RNA, 12 nt, Artificial Sequence
  Synthetic
uuaugggcaucu

SEQ ID NO: 1443 - RNA, 12 nt, Artificial Sequence
  Synthetic
uaugggcaucug

SEQ ID NO: 1444 - RNA, 12 nt, Artificial Sequence
  Synthetic
augggcaucugg

SEQ ID NO: 1445 - RNA, 12 nt, Artificial Sequence
  Synthetic
ugggcaucugga

SEQ ID NO: 1446 - RNA, 12 nt, Artificial Sequence
  Synthetic
gggcaucuggac

SEQ ID NO: 1447 - RNA, 12 nt, Artificial Sequence
  Synthetic
ggcaucuggacu

SEQ ID NO: 1448 - RNA, 12 nt, Artificial Sequence
  Synthetic
gcaucuggacuu

SEQ ID NO: 1449 - RNA, 12 nt, Artificial Sequence
  Synthetic
caucuggacuuc

SEQ ID NO: 1450 - RNA, 12 nt, Artificial Sequence
  Synthetic
aucuggacuuca

SEQ ID NO: 1451 - RNA, 12 nt, Artificial Sequence
  Synthetic
ucuggacuucaa

SEQ ID NO: 1452 - RNA, 12 nt, Artificial Sequence
  Synthetic
cuggacuucaac

SEQ ID NO: 1453 - RNA, 12 nt, Artificial Sequence
  Synthetic
uggacuucaacu

SEQ ID NO: 1454 - RNA, 12 nt, Artificial Sequence
  Synthetic
ggacuucaacuu

SEQ ID NO: 1455 - RNA, 12 nt, Artificial Sequence
  Synthetic
gacuucaacuug

SEQ ID NO: 1456 - RNA, 12 nt, Artificial Sequence
  Synthetic
acuucaacuugg

SEQ ID NO: 1457 - RNA, 12 nt, Artificial Sequence
  Synthetic
cuucaacuugga

SEQ ID NO: 1458 - RNA, 12 nt, Artificial Sequence
  Synthetic
uucaacuuggac

SEQ ID NO: 1459 - RNA, 12 nt, Artificial Sequence
  Synthetic
ucaacuuggaca

SEQ ID NO: 1460 - RNA, 12 nt, Artificial Sequence
  Synthetic
caacuuggacaa

SEQ ID NO: 1461 - RNA, 12 nt, Artificial Sequence
  Synthetic
aacuuggacaag

SEQ ID NO: 1462 - RNA, 12 nt, Artificial Sequence
  Synthetic
acuuggacaaga

SEQ ID NO: 1463 - RNA, 12 nt, Artificial Sequence
  Synthetic
cuuggacaagac

SEQ ID NO: 1464 - RNA, 12 nt, Artificial Sequence
  Synthetic
uuggacaagacc

SEQ ID NO: 1465 - RNA, 12 nt, Artificial Sequence
  Synthetic
uggacaagaccu

SEQ ID NO: 1466 - RNA, 12 nt, Artificial Sequence
  Synthetic
ggacaagaccuu

SEQ ID NO: 1467 - RNA, 12 nt, Artificial Sequence
  Synthetic
gacaagaccuua

SEQ ID NO: 1468 - RNA, 12 nt, Artificial Sequence
  Synthetic
acaagaccuuau

SEQ ID NO: 1469 - RNA, 12 nt, Artificial Sequence
  Synthetic
caagaccuuaua

SEQ ID NO: 1470 - RNA, 12 nt, Artificial Sequence
  Synthetic
aagaccuuauac

SEQ ID NO: 1471 - RNA, 12 nt, Artificial Sequence
  Synthetic
agaccuuauacu

SEQ ID NO: 1472 - RNA, 12 nt, Artificial Sequence
  Synthetic
gaccuuauacuu

SEQ ID NO: 1473 - RNA, 12 nt, Artificial Sequence
  Synthetic
accuuauacuuc

SEQ ID NO: 1474 - RNA, 12 nt, Artificial Sequence
  Synthetic
ccuuauacuucu

SEQ ID NO: 1475 - RNA, 12 nt, Artificial Sequence
  Synthetic
cuuauacuucuu

SEQ ID NO: 1476 - RNA, 12 nt, Artificial Sequence
  Synthetic
uuauacuucuuu

SEQ ID NO: 1477 - RNA, 12 nt, Artificial Sequence
  Synthetic
uauacuucuuua

SEQ ID NO: 1478 - RNA, 12 nt, Artificial Sequence
  Synthetic
auacuucuuuau

SEQ ID NO: 1479 - RNA, 12 nt, Artificial Sequence
  Synthetic
uacuucuuuauc

SEQ ID NO: 1480 - RNA, 12 nt, Artificial Sequence
  Synthetic
acuucuuuaucg

SEQ ID NO: 1481 - RNA, 12 nt, Artificial Sequence
  Synthetic
cuucuuuaucgc

SEQ ID NO: 1482 - RNA, 12 nt, Artificial Sequence
  Synthetic
uucuuuaucgcc

SEQ ID NO: 1483 - RNA, 12 nt, Artificial Sequence
  Synthetic
ucuuuaucgccg

SEQ ID NO: 1484 - RNA, 12 nt, Artificial Sequence
  Synthetic
cuuuaucgccgg

SEQ ID NO: 1485 - RNA, 12 nt, Artificial Sequence
  Synthetic
uuuaucgccggc

SEQ ID NO: 1486 - RNA, 12 nt, Artificial Sequence
  Synthetic
uuaucgccggcc

SEQ ID NO: 1487 - RNA, 12 nt, Artificial Sequence
  Synthetic
uaucgccggccg

SEQ ID NO: 1488 - RNA, 12 nt, Artificial Sequence
  Synthetic
aucgccggccgc

SEQ ID NO: 1489 - RNA, 12 nt, Artificial Sequence
  Synthetic
ucgccggccgcu

SEQ ID NO: 1490 - RNA, 12 nt, Artificial Sequence
  Synthetic
cgccggccgcua

SEQ ID NO: 1491 - RNA, 12 nt, Artificial Sequence
  Synthetic
gccggccgcuau

SEQ ID NO: 1492 - RNA, 12 nt, Artificial Sequence
  Synthetic
ccggccgcuaug

SEQ ID NO: 1493 - RNA, 12 nt, Artificial Sequence
  Synthetic
cggccgcuauga

SEQ ID NO: 1494 - RNA, 12 nt, Artificial Sequence
  Synthetic
ggccgcuaugag

SEQ ID NO: 1495 - RNA, 12 nt, Artificial Sequence
  Synthetic
gccgcuaugagu

SEQ ID NO: 1496 - RNA, 12 nt, Artificial Sequence
  Synthetic
ccgcuaugaguu

SEQ ID NO: 1497 - RNA, 12 nt, Artificial Sequence
  Synthetic
cgcuaugaguuc

SEQ ID NO: 1498 - RNA, 12 nt, Artificial Sequence
  Synthetic
gcuaugaguucu

SEQ ID NO: 1499 - RNA, 12 nt, Artificial Sequence
  Synthetic
cuaugaguucuc

SEQ ID NO: 1500 - RNA, 12 nt, Artificial Sequence
  Synthetic
uaugaguucucc

SEQ ID NO: 1501 - RNA, 12 nt, Artificial Sequence
  Synthetic
augaguucucca

SEQ ID NO: 1502 - RNA, 12 nt, Artificial Sequence
  Synthetic
ugaguucuccaa

SEQ ID NO: 1503 - RNA, 12 nt, Artificial Sequence
  Synthetic
gaguucuccaac

SEQ ID NO: 1504 - RNA, 12 nt, Artificial Sequence
  Synthetic
aguucuccaaca

SEQ ID NO: 1505 - RNA, 12 nt, Artificial Sequence
  Synthetic
guucuccaacaa

SEQ ID NO: 1506 - RNA, 12 nt, Artificial Sequence
  Synthetic
uucuccaacaag

SEQ ID NO: 1507 - RNA, 12 nt, Artificial Sequence
  Synthetic
ucuccaacaagg

SEQ ID NO: 1508 - RNA, 12 nt, Artificial Sequence
  Synthetic
cuccaacaaggg

SEQ ID NO: 1509 - RNA, 12 nt, Artificial Sequence
  Synthetic
uccaacaagggu

SEQ ID NO: 1510 - RNA, 12 nt, Artificial Sequence
  Synthetic
ccaacaagggug

SEQ ID NO: 1511 - RNA, 12 nt, Artificial Sequence
  Synthetic
caacaagggugc

SEQ ID NO: 1512 - RNA, 12 nt, Artificial Sequence
  Synthetic
aacaagggugcu

SEQ ID NO: 1513 - RNA, 12 nt, Artificial Sequence
  Synthetic
acaagggugcug

SEQ ID NO: 1514 - RNA, 12 nt, Artificial Sequence
  Synthetic
caagggugcuga

SEQ ID NO: 1515 - RNA, 12 nt, Artificial Sequence
  Synthetic
aagggugcugac

SEQ ID NO: 1516 - RNA, 12 nt, Artificial Sequence
  Synthetic
agggugcugacg

SEQ ID NO: 1517 - RNA, 12 nt, Artificial Sequence
  Synthetic
gggugcugacgu

SEQ ID NO: 1518 - RNA, 12 nt, Artificial Sequence
  Synthetic
ggugcugacguc

SEQ ID NO: 1519 - RNA, 12 nt, Artificial Sequence
  Synthetic
gugcugacgucu

SEQ ID NO: 1520 - RNA, 12 nt, Artificial Sequence
  Synthetic
ugcugacgucuu

SEQ ID NO: 1521 - RNA, 12 nt, Artificial Sequence
  Synthetic
gcugacgucuuc

SEQ ID NO: 1522 - RNA, 12 nt, Artificial Sequence
  Synthetic
cugacgucuucc

SEQ ID NO: 1523 - RNA, 12 nt, Artificial Sequence
  Synthetic
ugacgucuuccu

SEQ ID NO: 1524 - RNA, 12 nt, Artificial Sequence
  Synthetic
gacgucuuccug

SEQ ID NO: 1525 - RNA, 12 nt, Artificial Sequence
  Synthetic
acgucuuccugg

SEQ ID NO: 1526 - RNA, 12 nt, Artificial Sequence
  Synthetic
cgucuuccugga

SEQ ID NO: 1527 - RNA, 12 nt, Artificial Sequence
  Synthetic
gucuuccuggag

SEQ ID NO: 1528 - RNA, 12 nt, Artificial Sequence
  Synthetic
ucuuccuggagg

SEQ ID NO: 1529 - RNA, 12 nt, Artificial Sequence
  Synthetic
cuuccuggaggc

SEQ ID NO: 1530 - RNA, 12 nt, Artificial Sequence
  Synthetic
uuccuggaggca

SEQ ID NO: 1531 - RNA, 12 nt, Artificial Sequence
  Synthetic
uccuggaggcau

SEQ ID NO: 1532 - RNA, 12 nt, Artificial Sequence
  Synthetic
ccuggaggcauu

SEQ ID NO: 1533 - RNA, 12 nt, Artificial Sequence
  Synthetic
cuggaggcauug

SEQ ID NO: 1534 - RNA, 12 nt, Artificial Sequence
  Synthetic
uggaggcauugg

SEQ ID NO: 1535 - RNA, 12 nt, Artificial Sequence
  Synthetic
ggaggcauuggc

SEQ ID NO: 1536 - RNA, 12 nt, Artificial Sequence
  Synthetic
gaggcauuggcu

SEQ ID NO: 1537 - RNA, 12 nt, Artificial Sequence
  Synthetic
aggcauuggcuc

SEQ ID NO: 1538 - RNA, 12 nt, Artificial Sequence
  Synthetic
ggcauuggcucg

SEQ ID NO: 1539 - RNA, 12 nt, Artificial Sequence
  Synthetic
gcauuggcucgg

SEQ ID NO: 1540 - RNA, 12 nt, Artificial Sequence
  Synthetic
cauuggcucggc

SEQ ID NO: 1541 - RNA, 12 nt, Artificial Sequence
  Synthetic
auuggcucggcu

SEQ ID NO: 1542 - RNA, 12 nt, Artificial Sequence
  Synthetic
uuggcucggcuc

SEQ ID NO: 1543 - RNA, 12 nt, Artificial Sequence
  Synthetic
uggcucggcuca

SEQ ID NO: 1544 - RNA, 12 nt, Artificial Sequence
  Synthetic
ggcucggcucaa

SEQ ID NO: 1545 - RNA, 12 nt, Artificial Sequence
  Synthetic
gcucggcucaac

SEQ ID NO: 1546 - RNA, 12 nt, Artificial Sequence
  Synthetic
cucggcucaacu

SEQ ID NO: 1547 - RNA, 12 nt, Artificial Sequence
  Synthetic
ucggcucaacua

SEQ ID NO: 1548 - RNA, 12 nt, Artificial Sequence
  Synthetic
cggcucaacuau

SEQ ID NO: 1549 - RNA, 12 nt, Artificial Sequence
  Synthetic
ggcucaacuauc

SEQ ID NO: 1550 - RNA, 12 nt, Artificial Sequence
  Synthetic
gcucaacuaucu

SEQ ID NO: 1551 - RNA, 12 nt, Artificial Sequence
  Synthetic
cucaacuaucug

SEQ ID NO: 1552 - RNA, 12 nt, Artificial Sequence
  Synthetic
ucaacuaucugc

SEQ ID NO: 1553 - RNA, 12 nt, Artificial Sequence
  Synthetic
caacuaucugcu

SEQ ID NO: 1554 - RNA, 12 nt, Artificial Sequence
  Synthetic
aacuaucugcuc

SEQ ID NO: 1555 - RNA, 12 nt, Artificial Sequence
  Synthetic
acuaucugcuca

SEQ ID NO: 1556 - RNA, 12 nt, Artificial Sequence
  Synthetic
cuaucugcucag

SEQ ID NO: 1557 - RNA, 12 nt, Artificial Sequence
  Synthetic
uaucugcucaga

SEQ ID NO: 1558 - RNA, 12 nt, Artificial Sequence
  Synthetic
aucugcucagag

SEQ ID NO: 1559 - RNA, 12 nt, Artificial Sequence
  Synthetic
ucugcucagagu

SEQ ID NO: 1560 - RNA, 12 nt, Artificial Sequence
  Synthetic
cugcucagagug

SEQ ID NO: 1561 - RNA, 12 nt, Artificial Sequence
  Synthetic
ugcucagaguga

SEQ ID NO: 1562 - RNA, 12 nt, Artificial Sequence
  Synthetic
gcucagagugaa

SEQ ID NO: 1563 - RNA, 12 nt, Artificial Sequence
  Synthetic
cucagagugaac

SEQ ID NO: 1564 - RNA, 12 nt, Artificial Sequence
  Synthetic
ucagagugaacg

SEQ ID NO: 1565 - RNA, 12 nt, Artificial Sequence
  Synthetic
cagagugaacgg

SEQ ID NO: 1566 - RNA, 12 nt, Artificial Sequence
  Synthetic
agagugaacggc

SEQ ID NO: 1567 - RNA, 12 nt, Artificial Sequence
  Synthetic
gagugaacggca

SEQ ID NO: 1568 - RNA, 12 nt, Artificial Sequence
  Synthetic
agugaacggcag

SEQ ID NO: 1569 - RNA, 12 nt, Artificial Sequence
  Synthetic
gugaacggcagc

SEQ ID NO: 1570 - RNA, 12 nt, Artificial Sequence
  Synthetic
ugaacggcagcg

SEQ ID NO: 1571 - RNA, 12 nt, Artificial Sequence
  Synthetic
gaacggcagcga

SEQ ID NO: 1572 - RNA, 12 nt, Artificial Sequence
  Synthetic
aacggcagcgag

SEQ ID NO: 1573 - RNA, 12 nt, Artificial Sequence
  Synthetic
acggcagcgagc

SEQ ID NO: 1574 - RNA, 12 nt, Artificial Sequence
  Synthetic
cggcagcgagca

SEQ ID NO: 1575 - RNA, 12 nt, Artificial Sequence
  Synthetic
ggcagcgagcag

SEQ ID NO: 1576 - RNA, 12 nt, Artificial Sequence
  Synthetic
gcagcgagcaga

SEQ ID NO: 1577 - RNA, 12 nt, Artificial Sequence
  Synthetic
cagcgagcagac

SEQ ID NO: 1578 - RNA, 12 nt, Artificial Sequence
  Synthetic
agcgagcagaca

SEQ ID NO: 1579 - RNA, 12 nt, Artificial Sequence
  Synthetic
gcgagcagacag

SEQ ID NO: 1580 - RNA, 12 nt, Artificial Sequence
  Synthetic
cgagcagacagu

SEQ ID NO: 1581 - RNA, 12 nt, Artificial Sequence
  Synthetic
gagcagacagug

SEQ ID NO: 1582 - RNA, 12 nt, Artificial Sequence
  Synthetic
agcagacagugg

SEQ ID NO: 1583 - RNA, 12 nt, Artificial Sequence
  Synthetic
gcagacaguggu

SEQ ID NO: 1584 - RNA, 12 nt, Artificial Sequence
  Synthetic
cagacagugguu

SEQ ID NO: 1585 - RNA, 12 nt, Artificial Sequence
  Synthetic
agacagugguug

SEQ ID NO: 1586 - RNA, 12 nt, Artificial Sequence
  Synthetic
gacagugguugc

SEQ ID NO: 1587 - RNA, 12 nt, Artificial Sequence
  Synthetic
acagugguugcc

SEQ ID NO: 1588 - RNA, 12 nt, Artificial Sequence
  Synthetic
cagugguugccu

SEQ ID NO: 1589 - RNA, 12 nt, Artificial Sequence
  Synthetic
agugguugccuu

SEQ ID NO: 1590 - RNA, 12 nt, Artificial Sequence
  Synthetic
gugguugccuuc

SEQ ID NO: 1591 - RNA, 12 nt, Artificial Sequence
  Synthetic
ugguugccuucu

SEQ ID NO: 1592 - RNA, 12 nt, Artificial Sequence
  Synthetic
gguugccuucuu

SEQ ID NO: 1593 - RNA, 12 nt, Artificial Sequence
  Synthetic
guugccuucuuc

SEQ ID NO: 1594 - RNA, 12 nt, Artificial Sequence
  Synthetic
uugccuucuuca

SEQ ID NO: 1595 - RNA, 12 nt, Artificial Sequence
  Synthetic
ugccuucuucau

SEQ ID NO: 1596 - RNA, 12 nt, Artificial Sequence
  Synthetic
gccuucuucauc

SEQ ID NO: 1597 - RNA, 12 nt, Artificial Sequence
  Synthetic
ccuucuucauca

SEQ ID NO: 1598 - RNA, 12 nt, Artificial Sequence
  Synthetic
cuucuucaucau

SEQ ID NO: 1599 - RNA, 12 nt, Artificial Sequence
  Synthetic
uucuucaucaug

SEQ ID NO: 1600 - RNA, 12 nt, Artificial Sequence
  Synthetic
ucuucaucaugc

SEQ ID NO: 1601 - RNA, 12 nt, Artificial Sequence
  Synthetic
cuucaucaugcc

SEQ ID NO: 1602 - RNA, 12 nt, Artificial Sequence
  Synthetic
uucaucaugcca

SEQ ID NO: 1603 - RNA, 12 nt, Artificial Sequence
  Synthetic
ucaucaugccag

SEQ ID NO: 1604 - RNA, 12 nt, Artificial Sequence
  Synthetic
caucaugccagc

SEQ ID NO: 1605 - RNA, 12 nt, Artificial Sequence
  Synthetic
aucaugccagcg

SEQ ID NO: 1606 - RNA, 12 nt, Artificial Sequence
  Synthetic
ucaugccagcgc

SEQ ID NO: 1607 - RNA, 12 nt, Artificial Sequence
  Synthetic
caugccagcgcg

SEQ ID NO: 1608 - RNA, 12 nt, Artificial Sequence
  Synthetic
augccagcgcgg

SEQ ID NO: 1609 - RNA, 12 nt, Artificial Sequence
  Synthetic
ugccagcgcgga

SEQ ID NO: 1610 - RNA, 12 nt, Artificial Sequence
  Synthetic
gccagcgcggac

SEQ ID NO: 1611 - RNA, 12 nt, Artificial Sequence
  Synthetic
ccagcgcggacc

SEQ ID NO: 1612 - RNA, 12 nt, Artificial Sequence
  Synthetic
cagcgcggacca

SEQ ID NO: 1613 - RNA, 12 nt, Artificial Sequence
  Synthetic
agcgcggaccaa

SEQ ID NO: 1614 - RNA, 12 nt, Artificial Sequence
  Synthetic
gcgcggaccaac

SEQ ID NO: 1615 - RNA, 12 nt, Artificial Sequence
  Synthetic
cgcggaccaaca

SEQ ID NO: 1616 - RNA, 12 nt, Artificial Sequence
  Synthetic
gcggaccaacaa

SEQ ID NO: 1617 - RNA, 12 nt, Artificial Sequence
  Synthetic
cggaccaacaau

SEQ ID NO: 1618 - RNA, 12 nt, Artificial Sequence
  Synthetic
ggaccaacaauu

SEQ ID NO: 1619 - RNA, 12 nt, Artificial Sequence
  Synthetic
gaccaacaauuu

SEQ ID NO: 1620 - RNA, 12 nt, Artificial Sequence
  Synthetic
accaacaauuuc

SEQ ID NO: 1621 - RNA, 12 nt, Artificial Sequence
  Synthetic
ccaacaauuuca

SEQ ID NO: 1622 - RNA, 12 nt, Artificial Sequence
  Synthetic
caacaauuucaa

SEQ ID NO: 1623 - RNA, 12 nt, Artificial Sequence
  Synthetic
aacaauuucaac

SEQ ID NO: 1624 - RNA, 12 nt, Artificial Sequence
  Synthetic
acaauuucaacg

SEQ ID NO: 1625 - RNA, 12 nt, Artificial Sequence
  Synthetic
caauuucaacgu

SEQ ID NO: 1626 - RNA, 12 nt, Artificial Sequence
  Synthetic
aauuucaacgug

SEQ ID NO: 1627 - RNA, 12 nt, Artificial Sequence
  Synthetic
auuucaacgugg

SEQ ID NO: 1628 - RNA, 12 nt, Artificial Sequence
  Synthetic
uuucaacgugga

SEQ ID NO: 1629 - RNA, 12 nt, Artificial Sequence
  Synthetic
uucaacguggaa

SEQ ID NO: 1630 - RNA, 12 nt, Artificial Sequence
  Synthetic
ucaacguggaaa

SEQ ID NO: 1631 - RNA, 12 nt, Artificial Sequence
  Synthetic
caacguggaaac

SEQ ID NO: 1632 - RNA, 12 nt, Artificial Sequence
  Synthetic
aacguggaaacc

SEQ ID NO: 1633 - RNA, 12 nt, Artificial Sequence
  Synthetic
acguggaaaccc

SEQ ID NO: 1634 - RNA, 12 nt, Artificial Sequence
  Synthetic
cguggaaacccu

SEQ ID NO: 1635 - RNA, 12 nt, Artificial Sequence
  Synthetic
guggaaacccuc

SEQ ID NO: 1636 - RNA, 12 nt, Artificial Sequence
  Synthetic
uggaaacccuca

SEQ ID NO: 1637 - RNA, 12 nt, Artificial Sequence
  Synthetic
ggaaacccucaa

SEQ ID NO: 1638 - RNA, 12 nt, Artificial Sequence
  Synthetic
gaaacccucaaa

SEQ ID NO: 1639 - RNA, 12 nt, Artificial Sequence
  Synthetic
aaacccucaaag

SEQ ID NO: 1640 - RNA, 12 nt, Artificial Sequence
  Synthetic
aacccucaaagg

SEQ ID NO: 1641 - RNA, 12 nt, Artificial Sequence
  Synthetic
acccucaaaggc

SEQ ID NO: 1642 - RNA, 12 nt, Artificial Sequence
  Synthetic
cccucaaaggcc

SEQ ID NO: 1643 - RNA, 12 nt, Artificial Sequence
  Synthetic
ccucaaaggcca

SEQ ID NO: 1644 - RNA, 12 nt, Artificial Sequence
  Synthetic
cucaaaggccaa

SEQ ID NO: 1645 - RNA, 12 nt, Artificial Sequence
  Synthetic
ucaaaggccaag

SEQ ID NO: 1646 - RNA, 12 nt, Artificial Sequence
  Synthetic
caaaggccaagc

SEQ ID NO: 1647 - RNA, 12 nt, Artificial Sequence
  Synthetic
aaaggccaagcu

SEQ ID NO: 1648 - RNA, 12 nt, Artificial Sequence
  Synthetic
aaggccaagcug

SEQ ID NO: 1649 - RNA, 12 nt, Artificial Sequence
  Synthetic
aggccaagcugu

SEQ ID NO: 1650 - RNA, 12 nt, Artificial Sequence
  Synthetic
ggccaagcugug

SEQ ID NO: 1651 - RNA, 12 nt, Artificial Sequence
  Synthetic
gccaagcugugc

SEQ ID NO: 1652 - RNA, 12 nt, Artificial Sequence
  Synthetic
ccaagcugugcg

SEQ ID NO: 1653 - RNA, 12 nt, Artificial Sequence
  Synthetic
caagcugugcgc

SEQ ID NO: 1654 - RNA, 12 nt, Artificial Sequence
  Synthetic
aagcugugcgca

SEQ ID NO: 1655 - RNA, 12 nt, Artificial Sequence
  Synthetic
agcugugcgcaa

SEQ ID NO: 1656 - RNA, 12 nt, Artificial Sequence
  Synthetic
gcugugcgcaaa

SEQ ID NO: 1657 - RNA, 12 nt, Artificial Sequence
  Synthetic
cugugcgcaaac

SEQ ID NO: 1658 - RNA, 12 nt, Artificial Sequence
  Synthetic
ugugcgcaaaca

SEQ ID NO: 1659 - RNA, 12 nt, Artificial Sequence
  Synthetic
gugcgcaaacag

SEQ ID NO: 1660 - RNA, 12 nt, Artificial Sequence
  Synthetic
ugcgcaaacagc

SEQ ID NO: 1661 - RNA, 12 nt, Artificial Sequence
  Synthetic
gcgcaaacagcu

SEQ ID NO: 1662 - RNA, 12 nt, Artificial Sequence
  Synthetic
cgcaaacagcuu

SEQ ID NO: 1663 - RNA, 12 nt, Artificial Sequence
  Synthetic
gcaaacagcuuu

SEQ ID NO: 1664 - RNA, 12 nt, Artificial Sequence
  Synthetic
caaacagcuuug

SEQ ID NO: 1665 - RNA, 12 nt, Artificial Sequence
  Synthetic
aaacagcuuugg

SEQ ID NO: 1666 - RNA, 12 nt, Artificial Sequence
  Synthetic
aacagcuuuggg

SEQ ID NO: 1667 - RNA, 12 nt, Artificial Sequence
  Synthetic
acagcuuuggga

SEQ ID NO: 1668 - RNA, 12 nt, Artificial Sequence
  Synthetic
cagcuuugggac

SEQ ID NO: 1669 - RNA, 12 nt, Artificial Sequence
  Synthetic
agcuuugggaca

SEQ ID NO: 1670 - RNA, 12 nt, Artificial Sequence
  Synthetic
gcuuugggacac

SEQ ID NO: 1671 - RNA, 12 nt, Artificial Sequence
  Synthetic
cuuugggacacg

SEQ ID NO: 1672 - RNA, 12 nt, Artificial Sequence
  Synthetic
uuugggacacgg

SEQ ID NO: 1673 - RNA, 12 nt, Artificial Sequence
  Synthetic
uugggacacggc

SEQ ID NO: 1674 - RNA, 12 nt, Artificial Sequence
  Synthetic
ugggacacggcc

SEQ ID NO: 1675 - RNA, 12 nt, Artificial Sequence
  Synthetic
gggacacggcca

SEQ ID NO: 1676 - RNA, 12 nt, Artificial Sequence
  Synthetic
ggacacggccaa

SEQ ID NO: 1677 - RNA, 12 nt, Artificial Sequence
  Synthetic
gacacggccaac

SEQ ID NO: 1678 - RNA, 12 nt, Artificial Sequence
  Synthetic
acacggccaaca

SEQ ID NO: 1679 - RNA, 12 nt, Artificial Sequence
  Synthetic
cacggccaacac

SEQ ID NO: 1680 - RNA, 12 nt, Artificial Sequence
  Synthetic
acggccaacacg

SEQ ID NO: 1681 - RNA, 12 nt, Artificial Sequence
  Synthetic
cggccaacacgg

SEQ ID NO: 1682 - RNA, 12 nt, Artificial Sequence
  Synthetic
ggccaacacggu

SEQ ID NO: 1683 - RNA, 12 nt, Artificial Sequence
  Synthetic
gccaacacggug

SEQ ID NO: 1684 - RNA, 12 nt, Artificial Sequence
  Synthetic
ccaacacgguga

SEQ ID NO: 1685 - RNA, 12 nt, Artificial Sequence
  Synthetic
caacacggugaa

SEQ ID NO: 1686 - RNA, 12 nt, Artificial Sequence
  Synthetic
aacacggugaag

SEQ ID NO: 1687 - RNA, 12 nt, Artificial Sequence
  Synthetic
acacggugaagg

SEQ ID NO: 1688 - RNA, 12 nt, Artificial Sequence
  Synthetic
cacggugaagga

SEQ ID NO: 1689 - RNA, 12 nt, Artificial Sequence
  Synthetic
acggugaaggaa

SEQ ID NO: 1690 - RNA, 12 nt, Artificial Sequence
  Synthetic
cggugaaggaaa

SEQ ID NO: 1691 - RNA, 12 nt, Artificial Sequence
  Synthetic
ggugaaggaaaa

SEQ ID NO: 1692 - RNA, 12 nt, Artificial Sequence
  Synthetic
gugaaggaaaag

SEQ ID NO: 1693 - RNA, 12 nt, Artificial Sequence
  Synthetic
ugaaggaaaagu

SEQ ID NO: 1694 - RNA, 12 nt, Artificial Sequence
  Synthetic
gaaggaaaaguu

SEQ ID NO: 1695 - RNA, 12 nt, Artificial Sequence
  Synthetic
aaggaaaaguuc

SEQ ID NO: 1696 - RNA, 12 nt, Artificial Sequence
  Synthetic
aggaaaaguucg

SEQ ID NO: 1697 - RNA, 12 nt, Artificial Sequence
  Synthetic
ggaaaaguucgg

SEQ ID NO: 1698 - RNA, 12 nt, Artificial Sequence
  Synthetic
gaaaaguucggg

SEQ ID NO: 1699 - RNA, 12 nt, Artificial Sequence
  Synthetic
aaaaguucggga

SEQ ID NO: 1700 - RNA, 12 nt, Artificial Sequence
  Synthetic
aaaguucgggag

SEQ ID NO: 1701 - RNA, 12 nt, Artificial Sequence
  Synthetic
aaguucgggagg

SEQ ID NO: 1702 - RNA, 12 nt, Artificial Sequence
  Synthetic
aguucgggagga

SEQ ID NO: 1703 - RNA, 12 nt, Artificial Sequence
  Synthetic
guucgggaggaa

SEQ ID NO: 1704 - RNA, 12 nt, Artificial Sequence
  Synthetic
uucgggaggaag

SEQ ID NO: 1705 - RNA, 12 nt, Artificial Sequence
  Synthetic
ucgggaggaagc

SEQ ID NO: 1706 - RNA, 12 nt, Artificial Sequence
  Synthetic
cgggaggaagcu

SEQ ID NO: 1707 - RNA, 12 nt, Artificial Sequence
  Synthetic
gggaggaagcuu

SEQ ID NO: 1708 - RNA, 12 nt, Artificial Sequence
  Synthetic
ggaggaagcuuu

SEQ ID NO: 1709 - RNA, 12 nt, Artificial Sequence
  Synthetic
gaggaagcuuua

SEQ ID NO: 1710 - RNA, 12 nt, Artificial Sequence
  Synthetic
aggaagcuuuau

SEQ ID NO: 1711 - RNA, 12 nt, Artificial Sequence
  Synthetic
ggaagcuuuaug

SEQ ID NO: 1712 - RNA, 12 nt, Artificial Sequence
  Synthetic
gaagcuuuauga

SEQ ID NO: 1713 - RNA, 12 nt, Artificial Sequence
  Synthetic
aagcuuuaugaa

SEQ ID NO: 1714 - RNA, 12 nt, Artificial Sequence
  Synthetic
agcuuuaugaau

SEQ ID NO: 1715 - RNA, 12 nt, Artificial Sequence
  Synthetic
gcuuuaugaauc

SEQ ID NO: 1716 - RNA, 12 nt, Artificial Sequence
  Synthetic
cuuuaugaaucc

SEQ ID NO: 1717 - RNA, 12 nt, Artificial Sequence
  Synthetic
uuuaugaauccu

SEQ ID NO: 1718 - RNA, 12 nt, Artificial Sequence
  Synthetic
uuaugaauccuu

SEQ ID NO: 1719 - RNA, 12 nt, Artificial Sequence
  Synthetic
uaugaauccuua

SEQ ID NO: 1720 - RNA, 12 nt, Artificial Sequence
  Synthetic
augaauccuuac

SEQ ID NO: 1721 - RNA, 12 nt, Artificial Sequence
  Synthetic
ugaauccuuacu

SEQ ID NO: 1722 - RNA, 12 nt, Artificial Sequence
  Synthetic
gaauccuuacug

SEQ ID NO: 1723 - RNA, 12 nt, Artificial Sequence
  Synthetic
aauccuuacugg

SEQ ID NO: 1724 - RNA, 12 nt, Artificial Sequence
  Synthetic
auccuuacuggu

SEQ ID NO: 1725 - RNA, 12 nt, Artificial Sequence
  Synthetic
uccuuacugguu

SEQ ID NO: 1726 - RNA, 12 nt, Artificial Sequence
  Synthetic
ccuuacugguug

SEQ ID NO: 1727 - RNA, 12 nt, Artificial Sequence
  Synthetic
cuuacugguugg

SEQ ID NO: 1728 - RNA, 12 nt, Artificial Sequence
  Synthetic
uuacugguuggg

SEQ ID NO: 1729 - RNA, 12 nt, Artificial Sequence
  Synthetic
uacugguuggga

SEQ ID NO: 1730 - RNA, 12 nt, Artificial Sequence
  Synthetic
acugguugggag

SEQ ID NO: 1731 - RNA, 12 nt, Artificial Sequence
  Synthetic
cugguugggagc

SEQ ID NO: 1732 - RNA, 12 nt, Artificial Sequence
  Synthetic
ugguugggagcc

SEQ ID NO: 1733 - RNA, 12 nt, Artificial Sequence
  Synthetic
gguugggagccu

SEQ ID NO: 1734 - RNA, 12 nt, Artificial Sequence
  Synthetic
guugggagccuu

SEQ ID NO: 1735 - RNA, 12 nt, Artificial Sequence
  Synthetic
uugggagccuuc

SEQ ID NO: 1736 - RNA, 12 nt, Artificial Sequence
  Synthetic
ugggagccuucc

SEQ ID NO: 1737 - RNA, 12 nt, Artificial Sequence
  Synthetic
gggagccuuccc

SEQ ID NO: 1738 - RNA, 12 nt, Artificial Sequence
  Synthetic
ggagccuucccg

SEQ ID NO: 1739 - RNA, 12 nt, Artificial Sequence
  Synthetic
gagccuucccga

SEQ ID NO: 1740 - RNA, 12 nt, Artificial Sequence
  Synthetic
agccuucccgac

SEQ ID NO: 1741 - RNA, 12 nt, Artificial Sequence
  Synthetic
gccuucccgaca

SEQ ID NO: 1742 - RNA, 12 nt, Artificial Sequence
  Synthetic
ccuucccgacau

SEQ ID NO: 1743 - RNA, 12 nt, Artificial Sequence
  Synthetic
cuucccgacaug

SEQ ID NO: 1744 - RNA, 12 nt, Artificial Sequence
  Synthetic
uucccgacauga

SEQ ID NO: 1745 - RNA, 12 nt, Artificial Sequence
  Synthetic
ucccgacaugaa

SEQ ID NO: 1746 - RNA, 12 nt, Artificial Sequence
  Synthetic
cccgacaugaac

SEQ ID NO: 1747 - RNA, 12 nt, Artificial Sequence
  Synthetic
ccgacaugaaca

SEQ ID NO: 1748 - RNA, 12 nt, Artificial Sequence
  Synthetic
cgacaugaacaa

SEQ ID NO: 1749 - RNA, 12 nt, Artificial Sequence
  Synthetic
gacaugaacaag

SEQ ID NO: 1750 - RNA, 12 nt, Artificial Sequence
  Synthetic
acaugaacaaga

SEQ ID NO: 1751 - RNA, 12 nt, Artificial Sequence
  Synthetic
caugaacaagau

SEQ ID NO: 1752 - RNA, 12 nt, Artificial Sequence
  Synthetic
augaacaagaug

SEQ ID NO: 1753 - RNA, 12 nt, Artificial Sequence
  Synthetic
ugaacaagaugc

SEQ ID NO: 1754 - RNA, 12 nt, Artificial Sequence
  Synthetic
gaacaagaugcu

SEQ ID NO: 1755 - RNA, 12 nt, Artificial Sequence
  Synthetic
aacaagaugcug

SEQ ID NO: 1756 - RNA, 12 nt, Artificial Sequence
  Synthetic
acaagaugcugg

SEQ ID NO: 1757 - RNA, 12 nt, Artificial Sequence
  Synthetic
caagaugcugga

SEQ ID NO: 1758 - RNA, 12 nt, Artificial Sequence
  Synthetic
aagaugcuggau

SEQ ID NO: 1759 - RNA, 12 nt, Artificial Sequence
  Synthetic
agaugcuggaua

SEQ ID NO: 1760 - RNA, 12 nt, Artificial Sequence
  Synthetic
gaugcuggauaa

SEQ ID NO: 1761 - RNA, 12 nt, Artificial Sequence
  Synthetic
augcuggauaag

SEQ ID NO: 1762 - RNA, 12 nt, Artificial Sequence
  Synthetic
ugcuggauaagg

SEQ ID NO: 1763 - RNA, 12 nt, Artificial Sequence
  Synthetic
gcuggauaagga

SEQ ID NO: 1764 - RNA, 12 nt, Artificial Sequence
  Synthetic
cuggauaaggaa

SEQ ID NO: 1765 - RNA, 12 nt, Artificial Sequence
  Synthetic
uggauaaggaag

SEQ ID NO: 1766 - RNA, 12 nt, Artificial Sequence
  Synthetic
ggauaaggaaga

SEQ ID NO: 1767 - RNA, 12 nt, Artificial Sequence
  Synthetic
gauaaggaagac

SEQ ID NO: 1768 - RNA, 12 nt, Artificial Sequence
  Synthetic
auaaggaagacu

SEQ ID NO: 1769 - RNA, 12 nt, Artificial Sequence
  Synthetic
uaaggaagacuu

SEQ ID NO: 1770 - RNA, 12 nt, Artificial Sequence
  Synthetic
aaggaagacuuc

SEQ ID NO: 1771 - RNA, 12 nt, Artificial Sequence
  Synthetic
aggaagacuuca

SEQ ID NO: 1772 - RNA, 12 nt, Artificial Sequence
  Synthetic
ggaagacuucac

SEQ ID NO: 1773 - RNA, 12 nt, Artificial Sequence
  Synthetic
gaagacuucacu

SEQ ID NO: 1774 - RNA, 12 nt, Artificial Sequence
  Synthetic
aagacuucacua

SEQ ID NO: 1775 - RNA, 12 nt, Artificial Sequence
  Synthetic
agacuucacuau

SEQ ID NO: 1776 - RNA, 12 nt, Artificial Sequence
  Synthetic
gacuucacuaug

SEQ ID NO: 1777 - RNA, 12 nt, Artificial Sequence
  Synthetic
acuucacuauga

SEQ ID NO: 1778 - RNA, 12 nt, Artificial Sequence
  Synthetic
cuucacuaugau

SEQ ID NO: 1779 - RNA, 12 nt, Artificial Sequence
  Synthetic
uucacuaugaug

SEQ ID NO: 1780 - RNA, 12 nt, Artificial Sequence
  Synthetic
ucacuaugauga

SEQ ID NO: 1781 - RNA, 12 nt, Artificial Sequence
  Synthetic
cacuaugaugaa

SEQ ID NO: 1782 - RNA, 12 nt, Artificial Sequence
  Synthetic
acuaugaugaag

SEQ ID NO: 1783 - RNA, 12 nt, Artificial Sequence
  Synthetic
cuaugaugaaga

SEQ ID NO: 1784 - RNA, 12 nt, Artificial Sequence
  Synthetic
uaugaugaagag

SEQ ID NO: 1785 - RNA, 12 nt, Artificial Sequence
  Synthetic
augaugaagaga

SEQ ID NO: 1786 - RNA, 12 nt, Artificial Sequence
  Synthetic
ugaugaagagag

SEQ ID NO: 1787 - RNA, 12 nt, Artificial Sequence
  Synthetic
gaugaagagagc

SEQ ID NO: 1788 - RNA, 12 nt, Artificial Sequence
  Synthetic
augaagagagcc

SEQ ID NO: 1789 - RNA, 12 nt, Artificial Sequence
  Synthetic
ugaagagagcca

SEQ ID NO: 1790 - RNA, 12 nt, Artificial Sequence
  Synthetic
gaagagagccau

SEQ ID NO: 1791 - RNA, 12 nt, Artificial Sequence
  Synthetic
aagagagccauc

SEQ ID NO: 1792 - RNA, 12 nt, Artificial Sequence
  Synthetic
agagagccaucu

SEQ ID NO: 1793 - RNA, 12 nt, Artificial Sequence
  Synthetic
gagagccaucuu

SEQ ID NO: 1794 - RNA, 12 nt, Artificial Sequence
  Synthetic
agagccaucuuu

SEQ ID NO: 1795 - RNA, 12 nt, Artificial Sequence
  Synthetic
gagccaucuuug

SEQ ID NO: 1796 - RNA, 12 nt, Artificial Sequence
  Synthetic
agccaucuuugc

SEQ ID NO: 1797 - RNA, 12 nt, Artificial Sequence
  Synthetic
gccaucuuugca

SEQ ID NO: 1798 - RNA, 12 nt, Artificial Sequence
  Synthetic
ccaucuuugcaa

SEQ ID NO: 1799 - RNA, 12 nt, Artificial Sequence
  Synthetic
caucuuugcaac

SEQ ID NO: 1800 - RNA, 12 nt, Artificial Sequence
  Synthetic
aucuuugcaacg

SEQ ID NO: 1801 - RNA, 12 nt, Artificial Sequence
  Synthetic
ucuuugcaacgc

SEQ ID NO: 1802 - RNA, 12 nt, Artificial Sequence
  Synthetic
cuuugcaacgca

SEQ ID NO: 1803 - RNA, 12 nt, Artificial Sequence
  Synthetic
uuugcaacgcag

SEQ ID NO: 1804 - RNA, 12 nt, Artificial Sequence
  Synthetic
uugcaacgcagc

SEQ ID NO: 1805 - RNA, 12 nt, Artificial Sequence
  Synthetic
ugcaacgcagcg

SEQ ID NO: 1806 - RNA, 12 nt, Artificial Sequence
  Synthetic
gcaacgcagcgg

SEQ ID NO: 1807 - RNA, 12 nt, Artificial Sequence
  Synthetic
caacgcagcggc

SEQ ID NO: 1808 - RNA, 12 nt, Artificial Sequence
  Synthetic
aacgcagcggca

SEQ ID NO: 1809 - RNA, 12 nt, Artificial Sequence
  Synthetic
acgcagcggcag

SEQ ID NO: 1810 - RNA, 12 nt, Artificial Sequence
  Synthetic
cgcagcggcagu

SEQ ID NO: 1811 - RNA, 12 nt, Artificial Sequence
  Synthetic
gcagcggcaguc

SEQ ID NO: 1812 - RNA, 12 nt, Artificial Sequence
  Synthetic
cagcggcagucu

SEQ ID NO: 1813 - RNA, 12 nt, Artificial Sequence
  Synthetic
agcggcagucuu

SEQ ID NO: 1814 - RNA, 12 nt, Artificial Sequence
  Synthetic
gcggcagucuuu

SEQ ID NO: 1815 - RNA, 12 nt, Artificial Sequence
  Synthetic
cggcagucuuuc

SEQ ID NO: 1816 - RNA, 12 nt, Artificial Sequence
  Synthetic
ggcagucuuucc

SEQ ID NO: 1817 - RNA, 12 nt, Artificial Sequence
  Synthetic
gcagucuuuccc

SEQ ID NO: 1818 - RNA, 12 nt, Artificial Sequence
  Synthetic
cagucuuucccc

SEQ ID NO: 1819 - RNA, 12 nt, Artificial Sequence
  Synthetic
agucuuuccccc

SEQ ID NO: 1820 - RNA, 12 nt, Artificial Sequence
  Synthetic
gucuuucccccc

SEQ ID NO: 1821 - RNA, 12 nt, Artificial Sequence
  Synthetic
ucuuuccccccu

SEQ ID NO: 1822 - RNA, 12 nt, Artificial Sequence
  Synthetic
cuuuccccccug

SEQ ID NO: 1823 - RNA, 12 nt, Artificial Sequence
  Synthetic
uuuccccccugu

SEQ ID NO: 1824 - RNA, 12 nt, Artificial Sequence
  Synthetic
uuccccccugug

SEQ ID NO: 1825 - RNA, 12 nt, Artificial Sequence
  Synthetic
uccccccugugu

SEQ ID NO: 1826 - RNA, 12 nt, Artificial Sequence
  Synthetic
ccccccugugug

SEQ ID NO: 1827 - RNA, 12 nt, Artificial Sequence
  Synthetic
cccccugugugc

SEQ ID NO: 1828 - RNA, 12 nt, Artificial Sequence
  Synthetic
ccccugugugca

SEQ ID NO: 1829 - RNA, 12 nt, Artificial Sequence
  Synthetic
cccugugugcac

SEQ ID NO: 1830 - RNA, 12 nt, Artificial Sequence
  Synthetic
ccugugugcacc

SEQ ID NO: 1831 - RNA, 12 nt, Artificial Sequence
  Synthetic
cugugugcaccc

SEQ ID NO: 1832 - RNA, 12 nt, Artificial Sequence
  Synthetic
ugugugcaccca

SEQ ID NO: 1833 - RNA, 12 nt, Artificial Sequence
  Synthetic
gugugcacccac

SEQ ID NO: 1834 - RNA, 12 nt, Artificial Sequence
  Synthetic
ugugcacccaca

SEQ ID NO: 1835 - RNA, 12 nt, Artificial Sequence
  Synthetic
gugcacccacaa

SEQ ID NO: 1836 - RNA, 12 nt, Artificial Sequence
  Synthetic
ugcacccacaau

SEQ ID NO: 1837 - RNA, 12 nt, Artificial Sequence
  Synthetic
gcacccacaaua

SEQ ID NO: 1838 - RNA, 12 nt, Artificial Sequence
  Synthetic
cacccacaauau

SEQ ID NO: 1839 - RNA, 12 nt, Artificial Sequence
  Synthetic
acccacaauaug

SEQ ID NO: 1840 - RNA, 12 nt, Artificial Sequence
  Synthetic
cccacaauaugc

SEQ ID NO: 1841 - RNA, 12 nt, Artificial Sequence
  Synthetic
ccacaauaugcu

SEQ ID NO: 1842 - RNA, 12 nt, Artificial Sequence
  Synthetic
cacaauaugcug

SEQ ID NO: 1843 - RNA, 12 nt, Artificial Sequence
  Synthetic
acaauaugcugg

SEQ ID NO: 1844 - RNA, 12 nt, Artificial Sequence
  Synthetic
caauaugcugga

SEQ ID NO: 1845 - RNA, 12 nt, Artificial Sequence
  Synthetic
aauaugcuggau

SEQ ID NO: 1846 - RNA, 12 nt, Artificial Sequence
  Synthetic
auaugcuggaug

SEQ ID NO: 1847 - RNA, 12 nt, Artificial Sequence
  Synthetic
uaugcuggauga

SEQ ID NO: 1848 - RNA, 12 nt, Artificial Sequence
  Synthetic
augcuggaugac

SEQ ID NO: 1849 - RNA, 12 nt, Artificial Sequence
  Synthetic
ugcuggaugacu

SEQ ID NO: 1850 - RNA, 12 nt, Artificial Sequence
  Synthetic
gcuggaugacuc

SEQ ID NO: 1851 - RNA, 12 nt, Artificial Sequence
  Synthetic
cuggaugacucc

SEQ ID NO: 1852 - RNA, 12 nt, Artificial Sequence
  Synthetic
uggaugacuccu

SEQ ID NO: 1853 - RNA, 12 nt, Artificial Sequence
  Synthetic
ggaugacuccuc

SEQ ID NO: 1854 - RNA, 12 nt, Artificial Sequence
  Synthetic
gaugacuccuca

SEQ ID NO: 1855 - RNA, 12 nt, Artificial Sequence
  Synthetic
augacuccucag

SEQ ID NO: 1856 - RNA, 12 nt, Artificial Sequence
  Synthetic
ugacuccucaga

SEQ ID NO: 1857 - RNA, 12 nt, Artificial Sequence
  Synthetic
gacuccucagac

SEQ ID NO: 1858 - RNA, 12 nt, Artificial Sequence
  Synthetic
acuccucagacc

SEQ ID NO: 1859 - RNA, 12 nt, Artificial Sequence
  Synthetic
cuccucagaccc

SEQ ID NO: 1860 - RNA, 12 nt, Artificial Sequence
  Synthetic
uccucagacccc

SEQ ID NO: 1861 - RNA, 12 nt, Artificial Sequence
  Synthetic
ccucagacccca

SEQ ID NO: 1862 - RNA, 12 nt, Artificial Sequence
  Synthetic
cucagaccccau

SEQ ID NO: 1863 - RNA, 12 nt, Artificial Sequence
  Synthetic
ucagaccccauc

SEQ ID NO: 1864 - RNA, 12 nt, Artificial Sequence
  Synthetic
cagaccccaucc

SEQ ID NO: 1865 - RNA, 12 nt, Artificial Sequence
  Synthetic
agaccccauccu

SEQ ID NO: 1866 - RNA, 12 nt, Artificial Sequence
  Synthetic
gaccccauccug

SEQ ID NO: 1867 - RNA, 12 nt, Artificial Sequence
  Synthetic
accccauccuga

SEQ ID NO: 1868 - RNA, 12 nt, Artificial Sequence
  Synthetic
ccccauccugac

SEQ ID NO: 1869 - RNA, 12 nt, Artificial Sequence
  Synthetic
cccauccugacc

SEQ ID NO: 1870 - RNA, 12 nt, Artificial Sequence
  Synthetic
ccauccugacca

SEQ ID NO: 1871 - RNA, 12 nt, Artificial Sequence
  Synthetic
cauccugaccac

SEQ ID NO: 1872 - RNA, 12 nt, Artificial Sequence
  Synthetic
auccugaccacc

SEQ ID NO: 1873 - RNA, 12 nt, Artificial Sequence
  Synthetic
uccugaccacca

SEQ ID NO: 1874 - RNA, 12 nt, Artificial Sequence
  Synthetic
ccugaccaccau

SEQ ID NO: 1875 - RNA, 12 nt, Artificial Sequence
  Synthetic
cugaccaccauc

SEQ ID NO: 1876 - RNA, 12 nt, Artificial Sequence
  Synthetic
ugaccaccaucc

SEQ ID NO: 1877 - RNA, 12 nt, Artificial Sequence
  Synthetic
gaccaccauccg

SEQ ID NO: 1878 - RNA, 12 nt, Artificial Sequence
  Synthetic
accaccauccgc

SEQ ID NO: 1879 - RNA, 12 nt, Artificial Sequence
  Synthetic
ccaccauccgcc

SEQ ID NO: 1880 - RNA, 12 nt, Artificial Sequence
  Synthetic
caccauccgccg

SEQ ID NO: 1881 - RNA, 12 nt, Artificial Sequence
  Synthetic
accauccgccga

SEQ ID NO: 1882 - RNA, 12 nt, Artificial Sequence
  Synthetic
ccauccgccgaa

SEQ ID NO: 1883 - RNA, 12 nt, Artificial Sequence
  Synthetic
cauccgccgaau

SEQ ID NO: 1884 - RNA, 12 nt, Artificial Sequence
  Synthetic
auccgccgaauc

SEQ ID NO: 1885 - RNA, 12 nt, Artificial Sequence
  Synthetic
uccgccgaaucg

SEQ ID NO: 1886 - RNA, 12 nt, Artificial Sequence
  Synthetic
ccgccgaaucgg

SEQ ID NO: 1887 - RNA, 12 nt, Artificial Sequence
  Synthetic
cgccgaaucggc

SEQ ID NO: 1888 - RNA, 12 nt, Artificial Sequence
  Synthetic
gccgaaucggcc

SEQ ID NO: 1889 - RNA, 12 nt, Artificial Sequence
  Synthetic
ccgaaucggccu

SEQ ID NO: 1890 - RNA, 12 nt, Artificial Sequence
  Synthetic
cgaaucggccuc

SEQ ID NO: 1891 - RNA, 12 nt, Artificial Sequence
  Synthetic
gaaucggccucu

SEQ ID NO: 1892 - RNA, 12 nt, Artificial Sequence
  Synthetic
aaucggccucuu

SEQ ID NO: 1893 - RNA, 12 nt, Artificial Sequence
  Synthetic
aucggccucuuc

SEQ ID NO: 1894 - RNA, 12 nt, Artificial Sequence
  Synthetic
ucggccucuuca

SEQ ID NO: 1895 - RNA, 12 nt, Artificial Sequence
  Synthetic
cggccucuucaa

SEQ ID NO: 1896 - RNA, 12 nt, Artificial Sequence
  Synthetic
ggccucuucaau

SEQ ID NO: 1897 - RNA, 12 nt, Artificial Sequence
  Synthetic
gccucuucaaua

SEQ ID NO: 1898 - RNA, 12 nt, Artificial Sequence
  Synthetic
ccucuucaauag

SEQ ID NO: 1899 - RNA, 12 nt, Artificial Sequence
  Synthetic
cucuucaauagc

SEQ ID NO: 1900 - RNA, 12 nt, Artificial Sequence
  Synthetic
ucuucaauagca

SEQ ID NO: 1901 - RNA, 12 nt, Artificial Sequence
  Synthetic
cuucaauagcag

SEQ ID NO: 1902 - RNA, 12 nt, Artificial Sequence
  Synthetic
uucaauagcagu

SEQ ID NO: 1903 - RNA, 12 nt, Artificial Sequence
  Synthetic
ucaauagcagug

SEQ ID NO: 1904 - RNA, 12 nt, Artificial Sequence
  Synthetic
caauagcagugc

SEQ ID NO: 1905 - RNA, 12 nt, Artificial Sequence
  Synthetic
aauagcagugcc

SEQ ID NO: 1906 - RNA, 12 nt, Artificial Sequence
  Synthetic
auagcagugccg

SEQ ID NO: 1907 - RNA, 12 nt, Artificial Sequence
  Synthetic
uagcagugccga

SEQ ID NO: 1908 - RNA, 12 nt, Artificial Sequence
  Synthetic
agcagugccgac

SEQ ID NO: 1909 - RNA, 12 nt, Artificial Sequence
  Synthetic
gcagugccgaca

SEQ ID NO: 1910 - RNA, 12 nt, Artificial Sequence
  Synthetic
cagugccgacag

SEQ ID NO: 1911 - RNA, 12 nt, Artificial Sequence
  Synthetic
agugccgacagg

SEQ ID NO: 1912 - RNA, 12 nt, Artificial Sequence
  Synthetic
gugccgacaggg

SEQ ID NO: 1913 - RNA, 12 nt, Artificial Sequence
  Synthetic
ugccgacagggu

SEQ ID NO: 1914 - RNA, 12 nt, Artificial Sequence
  Synthetic
gccgacagggug

SEQ ID NO: 1915 - RNA, 12 nt, Artificial Sequence
  Synthetic
ccgacaggguga

SEQ ID NO: 1916 - RNA, 12 nt, Artificial Sequence
  Synthetic
cgacagggugaa

SEQ ID NO: 1917 - RNA, 12 nt, Artificial Sequence
  Synthetic
gacagggugaag

SEQ ID NO: 1918 - RNA, 12 nt, Artificial Sequence
  Synthetic
acagggugaagg

SEQ ID NO: 1919 - RNA, 12 nt, Artificial Sequence
  Synthetic
cagggugaaggu

SEQ ID NO: 1920 - RNA, 12 nt, Artificial Sequence
  Synthetic
agggugaaggug

SEQ ID NO: 1921 - RNA, 12 nt, Artificial Sequence
  Synthetic
gggugaagguga

SEQ ID NO: 1922 - RNA, 12 nt, Artificial Sequence
  Synthetic
ggugaaggugau

SEQ ID NO: 1923 - RNA, 12 nt, Artificial Sequence
  Synthetic
gugaaggugauu

SEQ ID NO: 1924 - RNA, 12 nt, Artificial Sequence
  Synthetic
ugaaggugauuu

SEQ ID NO: 1925 - RNA, 12 nt, Artificial Sequence
  Synthetic
gaaggugauuuu

SEQ ID NO: 1926 - RNA, 12 nt, Artificial Sequence
  Synthetic
aaggugauuuuc

SEQ ID NO: 1927 - RNA, 12 nt, Artificial Sequence
  Synthetic
aggugauuuucc

SEQ ID NO: 1928 - RNA, 12 nt, Artificial Sequence
  Synthetic
ggugauuuucca

SEQ ID NO: 1929 - RNA, 12 nt, Artificial Sequence
  Synthetic
gugauuuuccac

SEQ ID NO: 1930 - RNA, 12 nt, Artificial Sequence
  Synthetic
ugauuuuccacc

SEQ ID NO: 1931 - RNA, 12 nt, Artificial Sequence
  Synthetic
gauuuuccaccc

SEQ ID NO: 1932 - RNA, 12 nt, Artificial Sequence
  Synthetic
auuuuccacccg

SEQ ID NO: 1933 - RNA, 12 nt, Artificial Sequence
  Synthetic
uuuuccacccgg

SEQ ID NO: 1934 - RNA, 12 nt, Artificial Sequence
  Synthetic
uuuccacccgga

SEQ ID NO: 1935 - RNA, 12 nt, Artificial Sequence
  Synthetic
uuccacccggag

SEQ ID NO: 1936 - RNA, 12 nt, Artificial Sequence
  Synthetic
uccacccggagu

SEQ ID NO: 1937 - RNA, 12 nt, Artificial Sequence
  Synthetic
ccacccggaguu

SEQ ID NO: 1938 - RNA, 12 nt, Artificial Sequence
  Synthetic
cacccggaguuc

SEQ ID NO: 1939 - RNA, 12 nt, Artificial Sequence
  Synthetic
acccggaguucc

SEQ ID NO: 1940 - RNA, 12 nt, Artificial Sequence
  Synthetic
cccggaguuccu

SEQ ID NO: 1941 - RNA, 12 nt, Artificial Sequence
  Synthetic
ccggaguuccuc

SEQ ID NO: 1942 - RNA, 12 nt, Artificial Sequence
  Synthetic
cggaguuccucu

SEQ ID NO: 1943 - RNA, 12 nt, Artificial Sequence
  Synthetic
ggaguuccucuc

SEQ ID NO: 1944 - RNA, 12 nt, Artificial Sequence
  Synthetic
gaguuccucucc

SEQ ID NO: 1945 - RNA, 12 nt, Artificial Sequence
  Synthetic
aguuccucuccu

SEQ ID NO: 1946 - RNA, 12 nt, Artificial Sequence
  Synthetic
guuccucuccuc

SEQ ID NO: 1947 - RNA, 12 nt, Artificial Sequence
  Synthetic
uuccucuccucc

SEQ ID NO: 1948 - RNA, 12 nt, Artificial Sequence
  Synthetic
uccucuccucca

SEQ ID NO: 1949 - RNA, 12 nt, Artificial Sequence
  Synthetic
ccucuccuccac

SEQ ID NO: 1950 - RNA, 12 nt, Artificial Sequence
  Synthetic
cucuccuccaca

SEQ ID NO: 1951 - RNA, 12 nt, Artificial Sequence
  Synthetic
ucuccuccacaa

SEQ ID NO: 1952 - RNA, 12 nt, Artificial Sequence
  Synthetic
cuccuccacaag

SEQ ID NO: 1953 - RNA, 12 nt, Artificial Sequence
  Synthetic
uccuccacaagc

SEQ ID NO: 1954 - RNA, 12 nt, Artificial Sequence
  Synthetic
ccuccacaagcc

SEQ ID NO: 1955 - RNA, 12 nt, Artificial Sequence
  Synthetic
cuccacaagccc

SEQ ID NO: 1956 - RNA, 12 nt, Artificial Sequence
  Synthetic
uccacaagcccc

SEQ ID NO: 1957 - RNA, 12 nt, Artificial Sequence
  Synthetic
ccacaagccccc

SEQ ID NO: 1958 - RNA, 12 nt, Artificial Sequence
  Synthetic
cacaagcccccu

SEQ ID NO: 1959 - RNA, 12 nt, Artificial Sequence
  Synthetic
acaagcccccug

SEQ ID NO: 1960 - RNA, 12 nt, Artificial Sequence
  Synthetic
caagcccccugc

SEQ ID NO: 1961 - RNA, 12 nt, Artificial Sequence
  Synthetic
aagcccccugcu

SEQ ID NO: 1962 - RNA, 12 nt, Artificial Sequence
  Synthetic
agcccccugcuc

SEQ ID NO: 1963 - RNA, 12 nt, Artificial Sequence
  Synthetic
gcccccugcucc

SEQ ID NO: 1964 - RNA, 12 nt, Artificial Sequence
  Synthetic
cccccugcuccc

SEQ ID NO: 1965 - RNA, 12 nt, Artificial Sequence
  Synthetic
ccccugcucccu

SEQ ID NO: 1966 - RNA, 12 nt, Artificial Sequence
  Synthetic
cccugcucccug

SEQ ID NO: 1967 - RNA, 12 nt, Artificial Sequence
  Synthetic
ccugcucccugu

SEQ ID NO: 1968 - RNA, 12 nt, Artificial Sequence
  Synthetic
cugcucccugug

SEQ ID NO: 1969 - RNA, 12 nt, Artificial Sequence
  Synthetic
ugcucccugugg

SEQ ID NO: 1970 - RNA, 12 nt, Artificial Sequence
  Synthetic
gcucccugugga

SEQ ID NO: 1971 - RNA, 12 nt, Artificial Sequence
  Synthetic
cucccuguggac

SEQ ID NO: 1972 - RNA, 12 nt, Artificial Sequence
  Synthetic
ucccuguggacu

SEQ ID NO: 1973 - RNA, 12 nt, Artificial Sequence
  Synthetic
cccuguggacua

SEQ ID NO: 1974 - RNA, 12 nt, Artificial Sequence
  Synthetic
ccuguggacuau

SEQ ID NO: 1975 - RNA, 12 nt, Artificial Sequence
  Synthetic
cuguggacuaug

SEQ ID NO: 1976 - RNA, 12 nt, Artificial Sequence
  Synthetic
uguggacuauga

SEQ ID NO: 1977 - RNA, 12 nt, Artificial Sequence
  Synthetic
guggacuaugag

SEQ ID NO: 1978 - RNA, 12 nt, Artificial Sequence
  Synthetic
uggacuaugagg

SEQ ID NO: 1979 - RNA, 12 nt, Artificial Sequence
  Synthetic
ggacuaugagga

SEQ ID NO: 1980 - RNA, 12 nt, Artificial Sequence
  Synthetic
gacuaugaggag

SEQ ID NO: 1981 - RNA, 12 nt, Artificial Sequence
  Synthetic
acuaugaggagu

SEQ ID NO: 1982 - RNA, 12 nt, Artificial Sequence
  Synthetic
cuaugaggaguu

SEQ ID NO: 1983 - RNA, 12 nt, Artificial Sequence
  Synthetic
uaugaggaguuu

SEQ ID NO: 1984 - RNA, 12 nt, Artificial Sequence
  Synthetic
augaggaguuug

SEQ ID NO: 1985 - RNA, 12 nt, Artificial Sequence
  Synthetic
ugaggaguuugu

SEQ ID NO: 1986 - RNA, 12 nt, Artificial Sequence
  Synthetic
gaggaguuuguc

SEQ ID NO: 1987 - RNA, 12 nt, Artificial Sequence
  Synthetic
aggaguuugucc

SEQ ID NO: 1988 - RNA, 12 nt, Artificial Sequence
  Synthetic
ggaguuuguccg

SEQ ID NO: 1989 - RNA, 12 nt, Artificial Sequence
  Synthetic
gaguuuguccgu

SEQ ID NO: 1990 - RNA, 12 nt, Artificial Sequence
  Synthetic
aguuuguccgug

SEQ ID NO: 1991 - RNA, 12 nt, Artificial Sequence
  Synthetic
guuuguccgugg

SEQ ID NO: 1992 - RNA, 12 nt, Artificial Sequence
  Synthetic
uuuguccguggc

SEQ ID NO: 1993 - RNA, 12 nt, Artificial Sequence
  Synthetic
uuguccguggcu

SEQ ID NO: 1994 - RNA, 12 nt, Artificial Sequence
  Synthetic
uguccguggcug

SEQ ID NO: 1995 - RNA, 12 nt, Artificial Sequence
  Synthetic
guccguggcugu

SEQ ID NO: 1996 - RNA, 12 nt, Artificial Sequence
  Synthetic
uccguggcuguc

SEQ ID NO: 1997 - RNA, 12 nt, Artificial Sequence
  Synthetic
ccguggcuguca

SEQ ID NO: 1998 - RNA, 12 nt, Artificial Sequence
  Synthetic
cguggcugucac

SEQ ID NO: 1999 - RNA, 12 nt, Artificial Sequence
  Synthetic
guggcugucacc

SEQ ID NO: 2000 - RNA, 12 nt, Artificial Sequence
  Synthetic
uggcugucaccu

SEQ ID NO: 2001 - RNA, 12 nt, Artificial Sequence
  Synthetic
ggcugucaccuu

SEQ ID NO: 2002 - RNA, 12 nt, Artificial Sequence
  Synthetic
gcugucaccuug

SEQ ID NO: 2003 - RNA, 12 nt, Artificial Sequence
  Synthetic
cugucaccuugg

SEQ ID NO: 2004 - RNA, 12 nt, Artificial Sequence
  Synthetic
ugucaccuugga

SEQ ID NO: 2005 - RNA, 12 nt, Artificial Sequence
  Synthetic
gucaccuuggag

SEQ ID NO: 2006 - RNA, 12 nt, Artificial Sequence
  Synthetic
ucaccuuggagu

SEQ ID NO: 2007 - RNA, 12 nt, Artificial Sequence
  Synthetic
caccuuggaguc

SEQ ID NO: 2008 - RNA, 12 nt, Artificial Sequence
  Synthetic
accuuggagucu

SEQ ID NO: 2009 - RNA, 12 nt, Artificial Sequence
  Synthetic
ccuuggagucuu

SEQ ID NO: 2010 - RNA, 12 nt, Artificial Sequence
  Synthetic
cuuggagucuuc

SEQ ID NO: 2011 - RNA, 12 nt, Artificial Sequence
  Synthetic
uuggagucuucc

SEQ ID NO: 2012 - RNA, 12 nt, Artificial Sequence
  Synthetic
uggagucuuccc

SEQ ID NO: 2013 - RNA, 12 nt, Artificial Sequence
  Synthetic
ggagucuucccc

SEQ ID NO: 2014 - RNA, 12 nt, Artificial Sequence
  Synthetic
gagucuuccccu

SEQ ID NO: 2015 - RNA, 12 nt, Artificial Sequence
  Synthetic
agucuuccccuc

SEQ ID NO: 2016 - RNA, 12 nt, Artificial Sequence
  Synthetic
gucuuccccucc

SEQ ID NO: 2017 - RNA, 12 nt, Artificial Sequence
  Synthetic
ucuuccccuccu

SEQ ID NO: 2018 - RNA, 12 nt, Artificial Sequence
  Synthetic
cuuccccuccua

SEQ ID NO: 2019 - RNA, 12 nt, Artificial Sequence
  Synthetic
uuccccuccuac

SEQ ID NO: 2020 - RNA, 12 nt, Artificial Sequence
  Synthetic
uccccuccuacu

SEQ ID NO: 2021 - RNA, 12 nt, Artificial Sequence
  Synthetic
ccccuccuacua

SEQ ID NO: 2022 - RNA, 12 nt, Artificial Sequence
  Synthetic
cccuccuacuau

SEQ ID NO: 2023 - RNA, 12 nt, Artificial Sequence
  Synthetic
ccuccuacuaug

SEQ ID NO: 2024 - RNA, 12 nt, Artificial Sequence
  Synthetic
cuccuacuauga

SEQ ID NO: 2025 - RNA, 12 nt, Artificial Sequence
  Synthetic
uccuacuaugag

SEQ ID NO: 2026 - RNA, 12 nt, Artificial Sequence
  Synthetic
ccuacuaugagc

SEQ ID NO: 2027 - RNA, 12 nt, Artificial Sequence
  Synthetic
cuacuaugagcc

SEQ ID NO: 2028 - RNA, 12 nt, Artificial Sequence
  Synthetic
uacuaugagccu

SEQ ID NO: 2029 - RNA, 12 nt, Artificial Sequence
  Synthetic
acuaugagccuu

SEQ ID NO: 2030 - RNA, 12 nt, Artificial Sequence
  Synthetic
cuaugagccuug

SEQ ID NO: 2031 - RNA, 12 nt, Artificial Sequence
  Synthetic
uaugagccuugg

SEQ ID NO: 2032 - RNA, 12 nt, Artificial Sequence
  Synthetic
augagccuuggg

SEQ ID NO: 2033 - RNA, 12 nt, Artificial Sequence
  Synthetic
ugagccuugggg

SEQ ID NO: 2034 - RNA, 12 nt, Artificial Sequence
  Synthetic
gagccuuggggc

SEQ ID NO: 2035 - RNA, 12 nt, Artificial Sequence
  Synthetic
agccuuggggcu

SEQ ID NO: 2036 - RNA, 12 nt, Artificial Sequence
  Synthetic
gccuuggggcua

SEQ ID NO: 2037 - RNA, 12 nt, Artificial Sequence
  Synthetic
ccuuggggcuac

SEQ ID NO: 2038 - RNA, 12 nt, Artificial Sequence
  Synthetic
cuuggggcuaca

SEQ ID NO: 2039 - RNA, 12 nt, Artificial Sequence
  Synthetic
uuggggcuacac

SEQ ID NO: 2040 - RNA, 12 nt, Artificial Sequence
  Synthetic
uggggcuacaca

SEQ ID NO: 2041 - RNA, 12 nt, Artificial Sequence
  Synthetic
ggggcuacacac

SEQ ID NO: 2042 - RNA, 12 nt, Artificial Sequence
  Synthetic
gggcuacacacc

SEQ ID NO: 2043 - RNA, 12 nt, Artificial Sequence
  Synthetic
ggcuacacaccg

SEQ ID NO: 2044 - RNA, 12 nt, Artificial Sequence
  Synthetic
gcuacacaccgg

SEQ ID NO: 2045 - RNA, 12 nt, Artificial Sequence
  Synthetic
cuacacaccggc

SEQ ID NO: 2046 - RNA, 12 nt, Artificial Sequence
  Synthetic
uacacaccggcu

SEQ ID NO: 2047 - RNA, 12 nt, Artificial Sequence
  Synthetic
acacaccggcug

SEQ ID NO: 2048 - RNA, 12 nt, Artificial Sequence
  Synthetic
cacaccggcuga

SEQ ID NO: 2049 - RNA, 12 nt, Artificial Sequence
  Synthetic
acaccggcugag

SEQ ID NO: 2050 - RNA, 12 nt, Artificial Sequence
  Synthetic
caccggcugagu

SEQ ID NO: 2051 - RNA, 12 nt, Artificial Sequence
  Synthetic
accggcugagug

SEQ ID NO: 2052 - RNA, 12 nt, Artificial Sequence
  Synthetic
ccggcugagugc

SEQ ID NO: 2053 - RNA, 12 nt, Artificial Sequence
  Synthetic
cggcugagugca

SEQ ID NO: 2054 - RNA, 12 nt, Artificial Sequence
  Synthetic
ggcugagugcac

SEQ ID NO: 2055 - RNA, 12 nt, Artificial Sequence
  Synthetic
gcugagugcacg

SEQ ID NO: 2056 - RNA, 12 nt, Artificial Sequence
  Synthetic
cugagugcacgg

SEQ ID NO: 2057 - RNA, 12 nt, Artificial Sequence
  Synthetic
ugagugcacggu

SEQ ID NO: 2058 - RNA, 12 nt, Artificial Sequence
  Synthetic
gagugcacgguu

SEQ ID NO: 2059 - RNA, 12 nt, Artificial Sequence
  Synthetic
agugcacgguua

SEQ ID NO: 2060 - RNA, 12 nt, Artificial Sequence
  Synthetic
gugcacgguuau

SEQ ID NO: 2061 - RNA, 12 nt, Artificial Sequence
  Synthetic
ugcacgguuaug

SEQ ID NO: 2062 - RNA, 12 nt, Artificial Sequence
  Synthetic
gcacgguuaugg

SEQ ID NO: 2063 - RNA, 12 nt, Artificial Sequence
  Synthetic
cacgguuauggg

SEQ ID NO: 2064 - RNA, 12 nt, Artificial Sequence
  Synthetic
acgguuauggga

SEQ ID NO: 2065 - RNA, 12 nt, Artificial Sequence
  Synthetic
cgguuaugggaa

SEQ ID NO: 2066 - RNA, 12 nt, Artificial Sequence
  Synthetic
gguuaugggaau

SEQ ID NO: 2067 - RNA, 12 nt, Artificial Sequence
  Synthetic
guuaugggaauc

SEQ ID NO: 2068 - RNA, 12 nt, Artificial Sequence
  Synthetic
uuaugggaaucc

SEQ ID NO: 2069 - RNA, 12 nt, Artificial Sequence
  Synthetic
uaugggaauccc

SEQ ID NO: 2070 - RNA, 12 nt, Artificial Sequence
  Synthetic
augggaaucccc

SEQ ID NO: 2071 - RNA, 12 nt, Artificial Sequence
  Synthetic
ugggaaucccca

SEQ ID NO: 2072 - RNA, 12 nt, Artificial Sequence
  Synthetic
gggaauccccag

SEQ ID NO: 2073 - RNA, 12 nt, Artificial Sequence
  Synthetic
ggaauccccagu

SEQ ID NO: 2074 - RNA, 12 nt, Artificial Sequence
  Synthetic
gaauccccagua

SEQ ID NO: 2075 - RNA, 12 nt, Artificial Sequence
  Synthetic
aauccccaguau

SEQ ID NO: 2076 - RNA, 12 nt, Artificial Sequence
  Synthetic
auccccaguauc

SEQ ID NO: 2077 - RNA, 12 nt, Artificial Sequence
  Synthetic
uccccaguaucu

SEQ ID NO: 2078 - RNA, 12 nt, Artificial Sequence
  Synthetic
ccccaguaucuc

SEQ ID NO: 2079 - RNA, 12 nt, Artificial Sequence
  Synthetic
cccaguaucucc

SEQ ID NO: 2080 - RNA, 12 nt, Artificial Sequence
  Synthetic
ccaguaucucca

SEQ ID NO: 2081 - RNA, 12 nt, Artificial Sequence
  Synthetic
caguaucuccac

SEQ ID NO: 2082 - RNA, 12 nt, Artificial Sequence
  Synthetic
aguaucuccacc

SEQ ID NO: 2083 - RNA, 12 nt, Artificial Sequence
  Synthetic
guaucuccacca

SEQ ID NO: 2084 - RNA, 12 nt, Artificial Sequence
  Synthetic
uaucuccaccaa

SEQ ID NO: 2085 - RNA, 12 nt, Artificial Sequence
  Synthetic
aucuccaccaau

SEQ ID NO: 2086 - RNA, 12 nt, Artificial Sequence
  Synthetic
ucuccaccaauc

SEQ ID NO: 2087 - RNA, 12 nt, Artificial Sequence
  Synthetic
cuccaccaaucu

SEQ ID NO: 2088 - RNA, 12 nt, Artificial Sequence
  Synthetic
uccaccaaucuc

SEQ ID NO: 2089 - RNA, 12 nt, Artificial Sequence
  Synthetic
ccaccaaucucu

SEQ ID NO: 2090 - RNA, 12 nt, Artificial Sequence
  Synthetic
caccaaucucuc

SEQ ID NO: 2091 - RNA, 12 nt, Artificial Sequence
  Synthetic
accaaucucucc

SEQ ID NO: 2092 - RNA, 12 nt, Artificial Sequence
  Synthetic
ccaaucucuccg

SEQ ID NO: 2093 - RNA, 12 nt, Artificial Sequence
  Synthetic
caaucucuccgg

SEQ ID NO: 2094 - RNA, 12 nt, Artificial Sequence
  Synthetic
aaucucuccggc

SEQ ID NO: 2095 - RNA, 12 nt, Artificial Sequence
  Synthetic
aucucuccggcu

SEQ ID NO: 2096 - RNA, 12 nt, Artificial Sequence
  Synthetic
ucucuccggcuu

SEQ ID NO: 2097 - RNA, 12 nt, Artificial Sequence
  Synthetic
cucuccggcuuc

SEQ ID NO: 2098 - RNA, 12 nt, Artificial Sequence
  Synthetic
ucuccggcuucg

SEQ ID NO: 2099 - RNA, 12 nt, Artificial Sequence
  Synthetic
cuccggcuucgg

SEQ ID NO: 2100 - RNA, 12 nt, Artificial Sequence
  Synthetic
uccggcuucggc

SEQ ID NO: 2101 - RNA, 12 nt, Artificial Sequence
  Synthetic
ccggcuucggcu

SEQ ID NO: 2102 - RNA, 12 nt, Artificial Sequence
  Synthetic
cggcuucggcug

SEQ ID NO: 2103 - RNA, 12 nt, Artificial Sequence
  Synthetic
ggcuucggcugc

SEQ ID NO: 2104 - RNA, 12 nt, Artificial Sequence
  Synthetic
gcuucggcugcu

SEQ ID NO: 2105 - RNA, 12 nt, Artificial Sequence
  Synthetic
cuucggcugcuu

SEQ ID NO: 2106 - RNA, 12 nt, Artificial Sequence
  Synthetic
uucggcugcuuc

SEQ ID NO: 2107 - RNA, 12 nt, Artificial Sequence
  Synthetic
ucggcugcuuca

SEQ ID NO: 2108 - RNA, 12 nt, Artificial Sequence
  Synthetic
cggcugcuucau

SEQ ID NO: 2109 - RNA, 12 nt, Artificial Sequence
  Synthetic
ggcugcuucaug

SEQ ID NO: 2110 - RNA, 12 nt, Artificial Sequence
  Synthetic
gcugcuucaugg

SEQ ID NO: 2111 - RNA, 12 nt, Artificial Sequence
  Synthetic
cugcuucaugga

SEQ ID NO: 2112 - RNA, 12 nt, Artificial Sequence
  Synthetic
ugcuucauggag

SEQ ID NO: 2113 - RNA, 12 nt, Artificial Sequence
  Synthetic
gcuucauggagg

SEQ ID NO: 2114 - RNA, 12 nt, Artificial Sequence
  Synthetic
cuucauggagga

SEQ ID NO: 2115 - RNA, 12 nt, Artificial Sequence
  Synthetic
uucauggaggaa

SEQ ID NO: 2116 - RNA, 12 nt, Artificial Sequence
  Synthetic
ucauggaggaac

SEQ ID NO: 2117 - RNA, 12 nt, Artificial Sequence
  Synthetic
cauggaggaaca

SEQ ID NO: 2118 - RNA, 12 nt, Artificial Sequence
  Synthetic
auggaggaacac

SEQ ID NO: 2119 - RNA, 12 nt, Artificial Sequence
  Synthetic
uggaggaacaca

SEQ ID NO: 2120 - RNA, 12 nt, Artificial Sequence
  Synthetic
ggaggaacacau

SEQ ID NO: 2121 - RNA, 12 nt, Artificial Sequence
  Synthetic
gaggaacacauc

SEQ ID NO: 2122 - RNA, 12 nt, Artificial Sequence
  Synthetic
aggaacacaucg

SEQ ID NO: 2123 - RNA, 12 nt, Artificial Sequence
  Synthetic
ggaacacaucgc

SEQ ID NO: 2124 - RNA, 12 nt, Artificial Sequence
  Synthetic
gaacacaucgca

SEQ ID NO: 2125 - RNA, 12 nt, Artificial Sequence
  Synthetic
aacacaucgcag

SEQ ID NO: 2126 - RNA, 12 nt, Artificial Sequence
  Synthetic
acacaucgcaga

SEQ ID NO: 2127 - RNA, 12 nt, Artificial Sequence
  Synthetic
cacaucgcagac

SEQ ID NO: 2128 - RNA, 12 nt, Artificial Sequence
  Synthetic
acaucgcagacc

SEQ ID NO: 2129 - RNA, 12 nt, Artificial Sequence
  Synthetic
caucgcagaccc

SEQ ID NO: 2130 - RNA, 12 nt, Artificial Sequence
  Synthetic
aucgcagacccc

SEQ ID NO: 2131 - RNA, 12 nt, Artificial Sequence
  Synthetic
ucgcagaccccu

SEQ ID NO: 2132 - RNA, 12 nt, Artificial Sequence
  Synthetic
cgcagaccccuc

SEQ ID NO: 2133 - RNA, 12 nt, Artificial Sequence
  Synthetic
gcagaccccuca

SEQ ID NO: 2134 - RNA, 12 nt, Artificial Sequence
  Synthetic
cagaccccucag

SEQ ID NO: 2135 - RNA, 12 nt, Artificial Sequence
  Synthetic
agaccccucagc

SEQ ID NO: 2136 - RNA, 12 nt, Artificial Sequence
  Synthetic
gaccccucagcu

SEQ ID NO: 2137 - RNA, 12 nt, Artificial Sequence
  Synthetic
accccucagcuu

SEQ ID NO: 2138 - RNA, 12 nt, Artificial Sequence
  Synthetic
ccccucagcuua

SEQ ID NO: 2139 - RNA, 12 nt, Artificial Sequence
  Synthetic
cccucagcuuac

SEQ ID NO: 2140 - RNA, 12 nt, Artificial Sequence
  Synthetic
ccucagcuuacg

SEQ ID NO: 2141 - RNA, 12 nt, Artificial Sequence
  Synthetic
cucagcuuacgg

SEQ ID NO: 2142 - RNA, 12 nt, Artificial Sequence
  Synthetic
ucagcuuacggu

SEQ ID NO: 2143 - RNA, 12 nt, Artificial Sequence
  Synthetic
cagcuuacggua

SEQ ID NO: 2144 - RNA, 12 nt, Artificial Sequence
  Synthetic
agcuuacgguau

SEQ ID NO: 2145 - RNA, 12 nt, Artificial Sequence
  Synthetic
gcuuacgguauc

SEQ ID NO: 2146 - RNA, 12 nt, Artificial Sequence
  Synthetic
cuuacgguaucu

SEQ ID NO: 2147 - RNA, 12 nt, Artificial Sequence
  Synthetic
uuacgguaucua

SEQ ID NO: 2148 - RNA, 12 nt, Artificial Sequence
  Synthetic
uacgguaucuac

SEQ ID NO: 2149 - RNA, 12 nt, Artificial Sequence
  Synthetic
acgguaucuaca

SEQ ID NO: 2150 - RNA, 12 nt, Artificial Sequence
  Synthetic
cgguaucuacau

SEQ ID NO: 2151 - RNA, 12 nt, Artificial Sequence
  Synthetic
gguaucuacauu

SEQ ID NO: 2152 - RNA, 12 nt, Artificial Sequence
  Synthetic
guaucuacauuc

SEQ ID NO: 2153 - RNA, 12 nt, Artificial Sequence
  Synthetic
uaucuacauucu

SEQ ID NO: 2154 - RNA, 12 nt, Artificial Sequence
  Synthetic
aucuacauucuu

SEQ ID NO: 2155 - RNA, 12 nt, Artificial Sequence
  Synthetic
ucuacauucuug

SEQ ID NO: 2156 - RNA, 12 nt, Artificial Sequence
  Synthetic
cuacauucuuga

SEQ ID NO: 2157 - RNA, 12 nt, Artificial Sequence
  Synthetic
uacauucuugac

SEQ ID NO: 2158 - RNA, 12 nt, Artificial Sequence
  Synthetic
acauucuugacc

SEQ ID NO: 2159 - RNA, 12 nt, Artificial Sequence
  Synthetic
cauucuugaccg

SEQ ID NO: 2160 - RNA, 12 nt, Artificial Sequence
  Synthetic
auucuugaccgg

SEQ ID NO: 2161 - RNA, 12 nt, Artificial Sequence
  Synthetic
uucuugaccggc

SEQ ID NO: 2162 - RNA, 12 nt, Artificial Sequence
  Synthetic
ucuugaccggcg

SEQ ID NO: 2163 - RNA, 12 nt, Artificial Sequence
  Synthetic
cuugaccggcgg

SEQ ID NO: 2164 - RNA, 12 nt, Artificial Sequence
  Synthetic
uugaccggcggu

SEQ ID NO: 2165 - RNA, 12 nt, Artificial Sequence
  Synthetic
ugaccggcgguu

SEQ ID NO: 2166 - RNA, 12 nt, Artificial Sequence
  Synthetic
gaccggcgguuc

SEQ ID NO: 2167 - RNA, 12 nt, Artificial Sequence
  Synthetic
accggcgguucc

SEQ ID NO: 2168 - RNA, 12 nt, Artificial Sequence
  Synthetic
ccggcgguuccg

SEQ ID NO: 2169 - RNA, 12 nt, Artificial Sequence
  Synthetic
cggcgguuccgc

SEQ ID NO: 2170 - RNA, 12 nt, Artificial Sequence
  Synthetic
ggcgguuccgca

SEQ ID NO: 2171 - RNA, 12 nt, Artificial Sequence
  Synthetic
gcgguuccgcag

SEQ ID NO: 2172 - RNA, 12 nt, Artificial Sequence
  Synthetic
cgguuccgcagc

SEQ ID NO: 2173 - RNA, 12 nt, Artificial Sequence
  Synthetic
gguuccgcagcc

SEQ ID NO: 2174 - RNA, 12 nt, Artificial Sequence
  Synthetic
guuccgcagccu

SEQ ID NO: 2175 - RNA, 12 nt, Artificial Sequence
  Synthetic
uuccgcagccug

SEQ ID NO: 2176 - RNA, 12 nt, Artificial Sequence
  Synthetic
uccgcagccugg

SEQ ID NO: 2177 - RNA, 12 nt, Artificial Sequence
  Synthetic
ccgcagccugga

SEQ ID NO: 2178 - RNA, 12 nt, Artificial Sequence
  Synthetic
cgcagccuggau

SEQ ID NO: 2179 - RNA, 12 nt, Artificial Sequence
  Synthetic
gcagccuggaug

SEQ ID NO: 2180 - RNA, 12 nt, Artificial Sequence
  Synthetic
cagccuggauga

SEQ ID NO: 2181 - RNA, 12 nt, Artificial Sequence
  Synthetic
agccuggaugau

SEQ ID NO: 2182 - RNA, 12 nt, Artificial Sequence
  Synthetic
gccuggaugauu

SEQ ID NO: 2183 - RNA, 12 nt, Artificial Sequence
  Synthetic
ccuggaugauuc

SEQ ID NO: 2184 - RNA, 12 nt, Artificial Sequence
  Synthetic
cuggaugauucc

SEQ ID NO: 2185 - RNA, 12 nt, Artificial Sequence
  Synthetic
uggaugauuccu

SEQ ID NO: 2186 - RNA, 12 nt, Artificial Sequence
  Synthetic
ggaugauuccug

SEQ ID NO: 2187 - RNA, 12 nt, Artificial Sequence
  Synthetic
gaugauuccugc

SEQ ID NO: 2188 - RNA, 12 nt, Artificial Sequence
  Synthetic
augauuccugcu

SEQ ID NO: 2189 - RNA, 12 nt, Artificial Sequence
  Synthetic
ugauuccugcuc

SEQ ID NO: 2190 - RNA, 12 nt, Artificial Sequence
  Synthetic
gauuccugcucg

SEQ ID NO: 2191 - RNA, 12 nt, Artificial Sequence
  Synthetic
auuccugcucgc

SEQ ID NO: 2192 - RNA, 12 nt, Artificial Sequence
  Synthetic
uuccugcucgca

SEQ ID NO: 2193 - RNA, 12 nt, Artificial Sequence
  Synthetic
uccugcucgcag

SEQ ID NO: 2194 - RNA, 12 nt, Artificial Sequence
  Synthetic
ccugcucgcagc

SEQ ID NO: 2195 - RNA, 12 nt, Artificial Sequence
  Synthetic
cugcucgcagcu

SEQ ID NO: 2196 - RNA, 12 nt, Artificial Sequence
  Synthetic
ugcucgcagcuc

SEQ ID NO: 2197 - RNA, 12 nt, Artificial Sequence
  Synthetic
gcucgcagcuca

SEQ ID NO: 2198 - RNA, 12 nt, Artificial Sequence
  Synthetic
cucgcagcucac

SEQ ID NO: 2199 - RNA, 12 nt, Artificial Sequence
  Synthetic
ucgcagcucacc

SEQ ID NO: 2200 - RNA, 12 nt, Artificial Sequence
  Synthetic
cgcagcucaccu

SEQ ID NO: 2201 - RNA, 12 nt, Artificial Sequence
  Synthetic
gcagcucaccuc

SEQ ID NO: 2202 - RNA, 12 nt, Artificial Sequence
  Synthetic
cagcucaccucc

SEQ ID NO: 2203 - RNA, 12 nt, Artificial Sequence
  Synthetic
agcucaccuccu

SEQ ID NO: 2204 - RNA, 12 nt, Artificial Sequence
  Synthetic
gcucaccuccuu

SEQ ID NO: 2205 - RNA, 12 nt, Artificial Sequence
  Synthetic
cucaccuccuuc

SEQ ID NO: 2206 - RNA, 12 nt, Artificial Sequence
  Synthetic
ucaccuccuucc

SEQ ID NO: 2207 - RNA, 12 nt, Artificial Sequence
  Synthetic
caccuccuuccu

SEQ ID NO: 2208 - RNA, 12 nt, Artificial Sequence
  Synthetic
accuccuuccuc

SEQ ID NO: 2209 - RNA, 12 nt, Artificial Sequence
  Synthetic
ccuccuuccucu

SEQ ID NO: 2210 - RNA, 12 nt, Artificial Sequence
  Synthetic
cuccuuccucua

SEQ ID NO: 2211 - RNA, 12 nt, Artificial Sequence
  Synthetic
uccuuccucuac

SEQ ID NO: 2212 - RNA, 12 nt, Artificial Sequence
  Synthetic
ccuuccucuaca

SEQ ID NO: 2213 - RNA, 12 nt, Artificial Sequence
  Synthetic
cuuccucuacag

SEQ ID NO: 2214 - RNA, 12 nt, Artificial Sequence
  Synthetic
uuccucuacagu

SEQ ID NO: 2215 - RNA, 12 nt, Artificial Sequence
  Synthetic
uccucuacaguu

SEQ ID NO: 2216 - RNA, 12 nt, Artificial Sequence
  Synthetic
ccucuacaguuu

SEQ ID NO: 2217 - RNA, 12 nt, Artificial Sequence
  Synthetic
cucuacaguuuc

SEQ ID NO: 2218 - RNA, 12 nt, Artificial Sequence
  Synthetic
ucuacaguuucu

SEQ ID NO: 2219 - RNA, 12 nt, Artificial Sequence
  Synthetic
cuacaguuucug

SEQ ID NO: 2220 - RNA, 12 nt, Artificial Sequence
  Synthetic
uacaguuucugu

SEQ ID NO: 2221 - RNA, 12 nt, Artificial Sequence
  Synthetic
acaguuucuguc

SEQ ID NO: 2222 - RNA, 12 nt, Artificial Sequence
  Synthetic
caguuucuguca

SEQ ID NO: 2223 - RNA, 12 nt, Artificial Sequence
  Synthetic
aguuucugucag

SEQ ID NO: 2224 - RNA, 12 nt, Artificial Sequence
  Synthetic
guuucugucagc

SEQ ID NO: 2225 - RNA, 12 nt, Artificial Sequence
  Synthetic
uuucugucagca

SEQ ID NO: 2226 - RNA, 12 nt, Artificial Sequence
  Synthetic
uucugucagcag

SEQ ID NO: 2227 - RNA, 12 nt, Artificial Sequence
  Synthetic
ucugucagcaga

SEQ ID NO: 2228 - RNA, 12 nt, Artificial Sequence
  Synthetic
cugucagcagag

SEQ ID NO: 2229 - RNA, 12 nt, Artificial Sequence
  Synthetic
ugucagcagagc

SEQ ID NO: 2230 - RNA, 12 nt, Artificial Sequence
  Synthetic
gucagcagagcc

SEQ ID NO: 2231 - RNA, 12 nt, Artificial Sequence
  Synthetic
ucagcagagccg

SEQ ID NO: 2232 - RNA, 12 nt, Artificial Sequence
  Synthetic
cagcagagccgg

SEQ ID NO: 2233 - RNA, 12 nt, Artificial Sequence
  Synthetic
agcagagccggc

SEQ ID NO: 2234 - RNA, 12 nt, Artificial Sequence
  Synthetic
gcagagccggcg

SEQ ID NO: 2235 - RNA, 12 nt, Artificial Sequence
  Synthetic
cagagccggcgg

SEQ ID NO: 2236 - RNA, 12 nt, Artificial Sequence
  Synthetic
agagccggcggc

SEQ ID NO: 2237 - RNA, 12 nt, Artificial Sequence
  Synthetic
gagccggcggca

SEQ ID NO: 2238 - RNA, 12 nt, Artificial Sequence
  Synthetic
agccggcggcag

SEQ ID NO: 2239 - RNA, 12 nt, Artificial Sequence
  Synthetic
gccggcggcagc

SEQ ID NO: 2240 - RNA, 12 nt, Artificial Sequence
  Synthetic
ccggcggcagcg

SEQ ID NO: 2241 - RNA, 12 nt, Artificial Sequence
  Synthetic
cggcggcagcgu

SEQ ID NO: 2242 - RNA, 12 nt, Artificial Sequence
  Synthetic
ggcggcagcgua

SEQ ID NO: 2243 - RNA, 12 nt, Artificial Sequence
  Synthetic
gcggcagcguau

SEQ ID NO: 2244 - RNA, 12 nt, Artificial Sequence
  Synthetic
cggcagcguauc

SEQ ID NO: 2245 - RNA, 12 nt, Artificial Sequence
  Synthetic
ggcagcguauca

SEQ ID NO: 2246 - RNA, 12 nt, Artificial Sequence
  Synthetic
gcagcguaucau

SEQ ID NO: 2247 - RNA, 12 nt, Artificial Sequence
  Synthetic
cagcguaucauc

SEQ ID NO: 2248 - RNA, 12 nt, Artificial Sequence
  Synthetic
agcguaucaucc

SEQ ID NO: 2249 - RNA, 12 nt, Artificial Sequence
  Synthetic
gcguaucaucca

SEQ ID NO: 2250 - RNA, 12 nt, Artificial Sequence
  Synthetic
cguaucauccag

SEQ ID NO: 2251 - RNA, 12 nt, Artificial Sequence
  Synthetic
guaucauccagc

SEQ ID NO: 2252 - RNA, 12 nt, Artificial Sequence
  Synthetic
uaucauccagcg

SEQ ID NO: 2253 - RNA, 12 nt, Artificial Sequence
  Synthetic
aucauccagcgg

SEQ ID NO: 2254 - RNA, 12 nt, Artificial Sequence
  Synthetic
ucauccagcgga

SEQ ID NO: 2255 - RNA, 12 nt, Artificial Sequence
  Synthetic
cauccagcggaa

SEQ ID NO: 2256 - RNA, 12 nt, Artificial Sequence
  Synthetic
auccagcggaac

SEQ ID NO: 2257 - RNA, 12 nt, Artificial Sequence
  Synthetic
uccagcggaacc

SEQ ID NO: 2258 - RNA, 12 nt, Artificial Sequence
  Synthetic
ccagcggaaccg

SEQ ID NO: 2259 - RNA, 12 nt, Artificial Sequence
  Synthetic
cagcggaaccgc

SEQ ID NO: 2260 - RNA, 12 nt, Artificial Sequence
  Synthetic
agcggaaccgca

SEQ ID NO: 2261 - RNA, 12 nt, Artificial Sequence
  Synthetic
gcggaaccgcac

SEQ ID NO: 2262 - RNA, 12 nt, Artificial Sequence
  Synthetic
cggaaccgcacg

SEQ ID NO: 2263 - RNA, 12 nt, Artificial Sequence
  Synthetic
ggaaccgcacgg

SEQ ID NO: 2264 - RNA, 12 nt, Artificial Sequence
  Synthetic
gaaccgcacgga

SEQ ID NO: 2265 - RNA, 12 nt, Artificial Sequence
  Synthetic
aaccgcacggag

SEQ ID NO: 2266 - RNA, 12 nt, Artificial Sequence
  Synthetic
accgcacggagc

SEQ ID NO: 2267 - RNA, 12 nt, Artificial Sequence
  Synthetic
ccgcacggagcg

SEQ ID NO: 2268 - RNA, 12 nt, Artificial Sequence
  Synthetic
cgcacggagcgc

SEQ ID NO: 2269 - RNA, 12 nt, Artificial Sequence
  Synthetic
gcacggagcgcc

SEQ ID NO: 2270 - RNA, 12 nt, Artificial Sequence
  Synthetic
cacggagcgccu

SEQ ID NO: 2271 - RNA, 12 nt, Artificial Sequence
  Synthetic
acggagcgccuc

SEQ ID NO: 2272 - RNA, 12 nt, Artificial Sequence
  Synthetic
cggagcgccucu

SEQ ID NO: 2273 - RNA, 12 nt, Artificial Sequence
  Synthetic
ggagcgccucuc

SEQ ID NO: 2274 - RNA, 12 nt, Artificial Sequence
  Synthetic
gagcgccucucc

SEQ ID NO: 2275 - RNA, 12 nt, Artificial Sequence
  Synthetic
agcgccucuccg

SEQ ID NO: 2276 - RNA, 12 nt, Artificial Sequence
  Synthetic
gcgccucuccga

SEQ ID NO: 2277 - RNA, 12 nt, Artificial Sequence
  Synthetic
cgccucuccgac

SEQ ID NO: 2278 - RNA, 12 nt, Artificial Sequence
  Synthetic
gccucuccgacc

SEQ ID NO: 2279 - RNA, 12 nt, Artificial Sequence
  Synthetic
ccucuccgaccu

SEQ ID NO: 2280 - RNA, 12 nt, Artificial Sequence
  Synthetic
cucuccgaccuu

SEQ ID NO: 2281 - RNA, 12 nt, Artificial Sequence
  Synthetic
ucuccgaccuuc

SEQ ID NO: 2282 - RNA, 12 nt, Artificial Sequence
  Synthetic
cuccgaccuucu

SEQ ID NO: 2283 - RNA, 12 nt, Artificial Sequence
  Synthetic
uccgaccuucug

SEQ ID NO: 2284 - RNA, 12 nt, Artificial Sequence
  Synthetic
ccgaccuucugg

SEQ ID NO: 2285 - RNA, 12 nt, Artificial Sequence
  Synthetic
cgaccuucugga

SEQ ID NO: 2286 - RNA, 12 nt, Artificial Sequence
  Synthetic
gaccuucuggac

SEQ ID NO: 2287 - RNA, 12 nt, Artificial Sequence
  Synthetic
accuucuggacu

SEQ ID NO: 2288 - RNA, 12 nt, Artificial Sequence
  Synthetic
ccuucuggacug

SEQ ID NO: 2289 - RNA, 12 nt, Artificial Sequence
  Synthetic
cuucuggacugg

SEQ ID NO: 2290 - RNA, 12 nt, Artificial Sequence
  Synthetic
uucuggacugga

SEQ ID NO: 2291 - RNA, 12 nt, Artificial Sequence
  Synthetic
ucuggacuggaa

SEQ ID NO: 2292 - RNA, 12 nt, Artificial Sequence
  Synthetic
cuggacuggaaa

SEQ ID NO: 2293 - RNA, 12 nt, Artificial Sequence
  Synthetic
uggacuggaaau

SEQ ID NO: 2294 - RNA, 12 nt, Artificial Sequence
  Synthetic
ggacuggaaaua

SEQ ID NO: 2295 - RNA, 12 nt, Artificial Sequence
  Synthetic
gacuggaaauac

SEQ ID NO: 2296 - RNA, 12 nt, Artificial Sequence
  Synthetic
acuggaaauacc

SEQ ID NO: 2297 - RNA, 12 nt, Artificial Sequence
  Synthetic
cuggaaauaccu

SEQ ID NO: 2298 - RNA, 12 nt, Artificial Sequence
  Synthetic
uggaaauaccua

SEQ ID NO: 2299 - RNA, 12 nt, Artificial Sequence
  Synthetic
ggaaauaccuag

SEQ ID NO: 2300 - RNA, 12 nt, Artificial Sequence
  Synthetic
gaaauaccuagg

SEQ ID NO: 2301 - RNA, 12 nt, Artificial Sequence
  Synthetic
aaauaccuaggc

SEQ ID NO: 2302 - RNA, 12 nt, Artificial Sequence
  Synthetic
aauaccuaggcc

SEQ ID NO: 2303 - RNA, 12 nt, Artificial Sequence
  Synthetic
auaccuaggccg

SEQ ID NO: 2304 - RNA, 12 nt, Artificial Sequence
  Synthetic
uaccuaggccgg

SEQ ID NO: 2305 - RNA, 12 nt, Artificial Sequence
  Synthetic
accuaggccggu

SEQ ID NO: 2306 - RNA, 12 nt, Artificial Sequence
  Synthetic
ccuaggccggua

SEQ ID NO: 2307 - RNA, 12 nt, Artificial Sequence
  Synthetic
cuaggccgguac

SEQ ID NO: 2308 - RNA, 12 nt, Artificial Sequence
  Synthetic
uaggccgguacu

SEQ ID NO: 2309 - RNA, 12 nt, Artificial Sequence
  Synthetic
aggccgguacua

SEQ ID NO: 2310 - RNA, 12 nt, Artificial Sequence
  Synthetic
ggccgguacuau

SEQ ID NO: 2311 - RNA, 12 nt, Artificial Sequence
  Synthetic
gccgguacuaua

SEQ ID NO: 2312 - RNA, 12 nt, Artificial Sequence
  Synthetic
ccgguacuauau

SEQ ID NO: 2313 - RNA, 12 nt, Artificial Sequence
  Synthetic
cgguacuauaug

SEQ ID NO: 2314 - RNA, 12 nt, Artificial Sequence
  Synthetic
gguacuauaugu

SEQ ID NO: 2315 - RNA, 12 nt, Artificial Sequence
  Synthetic
guacuauauguc

SEQ ID NO: 2316 - RNA, 12 nt, Artificial Sequence
  Synthetic
uacuauaugucu

SEQ ID NO: 2317 - RNA, 12 nt, Artificial Sequence
  Synthetic
acuauaugucug

SEQ ID NO: 2318 - RNA, 12 nt, Artificial Sequence
  Synthetic
cuauaugucugc

SEQ ID NO: 2319 - RNA, 12 nt, Artificial Sequence
  Synthetic
uauaugucugcg

SEQ ID NO: 2320 - RNA, 12 nt, Artificial Sequence
  Synthetic
auaugucugcgc

SEQ ID NO: 2321 - RNA, 12 nt, Artificial Sequence
  Synthetic
uaugucugcgcg

SEQ ID NO: 2322 - RNA, 12 nt, Artificial Sequence
  Synthetic
augucugcgcgc

SEQ ID NO: 2323 - RNA, 12 nt, Artificial Sequence
  Synthetic
ugucugcgcgcc

SEQ ID NO: 2324 - RNA, 12 nt, Artificial Sequence
  Synthetic
gucugcgcgcca

SEQ ID NO: 2325 - RNA, 12 nt, Artificial Sequence
  Synthetic
ucugcgcgccac

SEQ ID NO: 2326 - RNA, 12 nt, Artificial Sequence
  Synthetic
cugcgcgccaca

SEQ ID NO: 2327 - RNA, 12 nt, Artificial Sequence
  Synthetic
ugcgcgccacau

SEQ ID NO: 2328 - RNA, 12 nt, Artificial Sequence
  Synthetic
gcgcgccacaug

SEQ ID NO: 2329 - RNA, 12 nt, Artificial Sequence
  Synthetic
cgcgccacaugg

SEQ ID NO: 2330 - RNA, 12 nt, Artificial Sequence
  Synthetic
gcgccacauggc

SEQ ID NO: 2331 - RNA, 12 nt, Artificial Sequence
  Synthetic
cgccacauggcg

SEQ ID NO: 2332 - RNA, 12 nt, Artificial Sequence
  Synthetic
gccacauggcgc

SEQ ID NO: 2333 - RNA, 12 nt, Artificial Sequence
  Synthetic
ccacauggcgcu

SEQ ID NO: 2334 - RNA, 12 nt, Artificial Sequence
  Synthetic
cacauggcgcug

SEQ ID NO: 2335 - RNA, 12 nt, Artificial Sequence
  Synthetic
acauggcgcugu

SEQ ID NO: 2336 - RNA, 12 nt, Artificial Sequence
  Synthetic
cauggcgcuguc

SEQ ID NO: 2337 - RNA, 12 nt, Artificial Sequence
  Synthetic
auggcgcugucc

SEQ ID NO: 2338 - RNA, 12 nt, Artificial Sequence
  Synthetic
uggcgcugucca

SEQ ID NO: 2339 - RNA, 12 nt, Artificial Sequence
  Synthetic
ggcgcuguccaa

SEQ ID NO: 2340 - RNA, 12 nt, Artificial Sequence
  Synthetic
gcgcuguccaag

SEQ ID NO: 2341 - RNA, 12 nt, Artificial Sequence
  Synthetic
cgcuguccaagg

SEQ ID NO: 2342 - RNA, 12 nt, Artificial Sequence
  Synthetic
gcuguccaaggc

SEQ ID NO: 2343 - RNA, 12 nt, Artificial Sequence
  Synthetic
cuguccaaggcc

SEQ ID NO: 2344 - RNA, 12 nt, Artificial Sequence
  Synthetic
uguccaaggccu

SEQ ID NO: 2345 - RNA, 12 nt, Artificial Sequence
  Synthetic
guccaaggccuu

SEQ ID NO: 2346 - RNA, 12 nt, Artificial Sequence
  Synthetic
uccaaggccuuu

SEQ ID NO: 2347 - RNA, 12 nt, Artificial Sequence
  Synthetic
ccaaggccuuuc

SEQ ID NO: 2348 - RNA, 12 nt, Artificial Sequence
  Synthetic
caaggccuuucc

SEQ ID NO: 2349 - RNA, 12 nt, Artificial Sequence
  Synthetic
aaggccuuucca

SEQ ID NO: 2350 - RNA, 12 nt, Artificial Sequence
  Synthetic
aggccuuuccag

SEQ ID NO: 2351 - RNA, 12 nt, Artificial Sequence
  Synthetic
ggccuuuccaga

SEQ ID NO: 2352 - RNA, 12 nt, Artificial Sequence
  Synthetic
gccuuuccagag

SEQ ID NO: 2353 - RNA, 12 nt, Artificial Sequence
  Synthetic
ccuuuccagagc

SEQ ID NO: 2354 - RNA, 12 nt, Artificial Sequence
  Synthetic
cuuuccagagca

SEQ ID NO: 2355 - RNA, 12 nt, Artificial Sequence
  Synthetic
uuuccagagcac

SEQ ID NO: 2356 - RNA, 12 nt, Artificial Sequence
  Synthetic
uuccagagcacu

SEQ ID NO: 2357 - RNA, 12 nt, Artificial Sequence
  Synthetic
uccagagcacuu

SEQ ID NO: 2358 - RNA, 12 nt, Artificial Sequence
  Synthetic
ccagagcacuuc

SEQ ID NO: 2359 - RNA, 12 nt, Artificial Sequence
  Synthetic
cagagcacuuca

SEQ ID NO: 2360 - RNA, 12 nt, Artificial Sequence
  Synthetic
agagcacuucac

SEQ ID NO: 2361 - RNA, 12 nt, Artificial Sequence
  Synthetic
gagcacuucacc

SEQ ID NO: 2362 - RNA, 12 nt, Artificial Sequence
  Synthetic
agcacuucaccu

SEQ ID NO: 2363 - RNA, 12 nt, Artificial Sequence
  Synthetic
gcacuucaccua

SEQ ID NO: 2364 - RNA, 12 nt, Artificial Sequence
  Synthetic
cacuucaccuac

SEQ ID NO: 2365 - RNA, 12 nt, Artificial Sequence
  Synthetic
acuucaccuacg

SEQ ID NO: 2366 - RNA, 12 nt, Artificial Sequence
  Synthetic
cuucaccuacga

SEQ ID NO: 2367 - RNA, 12 nt, Artificial Sequence
  Synthetic
uucaccuacgag

SEQ ID NO: 2368 - RNA, 12 nt, Artificial Sequence
  Synthetic
ucaccuacgagc

SEQ ID NO: 2369 - RNA, 12 nt, Artificial Sequence
  Synthetic
caccuacgagcc

SEQ ID NO: 2370 - RNA, 12 nt, Artificial Sequence
  Synthetic
accuacgagccc

SEQ ID NO: 2371 - RNA, 12 nt, Artificial Sequence
  Synthetic
ccuacgagccca

SEQ ID NO: 2372 - RNA, 12 nt, Artificial Sequence
  Synthetic
cuacgagcccaa

SEQ ID NO: 2373 - RNA, 12 nt, Artificial Sequence
  Synthetic
uacgagcccaac

SEQ ID NO: 2374 - RNA, 12 nt, Artificial Sequence
  Synthetic
acgagcccaacg

SEQ ID NO: 2375 - RNA, 12 nt, Artificial Sequence
  Synthetic
cgagcccaacga

SEQ ID NO: 2376 - RNA, 12 nt, Artificial Sequence
  Synthetic
gagcccaacgag

SEQ ID NO: 2377 - RNA, 12 nt, Artificial Sequence
  Synthetic
agcccaacgagg

SEQ ID NO: 2378 - RNA, 12 nt, Artificial Sequence
  Synthetic
gcccaacgaggc

SEQ ID NO: 2379 - RNA, 12 nt, Artificial Sequence
  Synthetic
cccaacgaggcg

SEQ ID NO: 2380 - RNA, 12 nt, Artificial Sequence
  Synthetic
ccaacgaggcgg

SEQ ID NO: 2381 - RNA, 12 nt, Artificial Sequence
  Synthetic
caacgaggcgga

SEQ ID NO: 2382 - RNA, 12 nt, Artificial Sequence
  Synthetic
aacgaggcggau

SEQ ID NO: 2383 - RNA, 12 nt, Artificial Sequence
  Synthetic
acgaggcggaug

SEQ ID NO: 2384 - RNA, 12 nt, Artificial Sequence
  Synthetic
cgaggcggaugc

SEQ ID NO: 2385 - RNA, 12 nt, Artificial Sequence
  Synthetic
gaggcggaugcg

SEQ ID NO: 2386 - RNA, 12 nt, Artificial Sequence
  Synthetic
aggcggaugcgg

SEQ ID NO: 2387 - RNA, 12 nt, Artificial Sequence
  Synthetic
ggcggaugcggc

SEQ ID NO: 2388 - RNA, 12 nt, Artificial Sequence
  Synthetic
gcggaugcggcc

SEQ ID NO: 2389 - RNA, 12 nt, Artificial Sequence
  Synthetic
cggaugcggccc

SEQ ID NO: 2390 - RNA, 12 nt, Artificial Sequence
  Synthetic
ggaugcggccca

SEQ ID NO: 2391 - RNA, 12 nt, Artificial Sequence
  Synthetic
gaugcggcccag

SEQ ID NO: 2392 - RNA, 12 nt, Artificial Sequence
  Synthetic
augcggcccagg

SEQ ID NO: 2393 - RNA, 12 nt, Artificial Sequence
  Synthetic
ugcggcccaggg

SEQ ID NO: 2394 - RNA, 12 nt, Artificial Sequence
  Synthetic
gcggcccagggg

SEQ ID NO: 2395 - RNA, 12 nt, Artificial Sequence
  Synthetic
cggcccaggggu

SEQ ID NO: 2396 - RNA, 12 nt, Artificial Sequence
  Synthetic
ggcccaggggua

SEQ ID NO: 2397 - RNA, 12 nt, Artificial Sequence
  Synthetic
gcccagggguac

SEQ ID NO: 2398 - RNA, 12 nt, Artificial Sequence
  Synthetic
cccagggguacc

SEQ ID NO: 2399 - RNA, 12 nt, Artificial Sequence
  Synthetic
ccagggguaccg

SEQ ID NO: 2400 - RNA, 12 nt, Artificial Sequence
  Synthetic
cagggguaccgc

SEQ ID NO: 2401 - RNA, 12 nt, Artificial Sequence
  Synthetic
agggguaccgcu

SEQ ID NO: 2402 - RNA, 12 nt, Artificial Sequence
  Synthetic
gggguaccgcua

SEQ ID NO: 2403 - RNA, 12 nt, Artificial Sequence
  Synthetic
ggguaccgcuac

SEQ ID NO: 2404 - RNA, 12 nt, Artificial Sequence
  Synthetic
gguaccgcuacc

SEQ ID NO: 2405 - RNA, 12 nt, Artificial Sequence
  Synthetic
guaccgcuaccc

SEQ ID NO: 2406 - RNA, 12 nt, Artificial Sequence
  Synthetic
uaccgcuaccca

SEQ ID NO: 2407 - RNA, 12 nt, Artificial Sequence
  Synthetic
accgcuacccac

SEQ ID NO: 2408 - RNA, 12 nt, Artificial Sequence
  Synthetic
ccgcuacccacg

SEQ ID NO: 2409 - RNA, 12 nt, Artificial Sequence
  Synthetic
cgcuacccacgg

SEQ ID NO: 2410 - RNA, 12 nt, Artificial Sequence
  Synthetic
gcuacccacggc

SEQ ID NO: 2411 - RNA, 12 nt, Artificial Sequence
  Synthetic
cuacccacggcc

SEQ ID NO: 2412 - RNA, 12 nt, Artificial Sequence
  Synthetic
uacccacggcca

SEQ ID NO: 2413 - RNA, 12 nt, Artificial Sequence
  Synthetic
acccacggccag

SEQ ID NO: 2414 - RNA, 12 nt, Artificial Sequence
  Synthetic
cccacggccagc

SEQ ID NO: 2415 - RNA, 12 nt, Artificial Sequence
  Synthetic
ccacggccagcc

SEQ ID NO: 2416 - RNA, 12 nt, Artificial Sequence
  Synthetic
cacggccagccu

SEQ ID NO: 2417 - RNA, 12 nt, Artificial Sequence
  Synthetic
acggccagccuc

SEQ ID NO: 2418 - RNA, 12 nt, Artificial Sequence
  Synthetic
cggccagccucg

SEQ ID NO: 2419 - RNA, 12 nt, Artificial Sequence
  Synthetic
ggccagccucgg

SEQ ID NO: 2420 - RNA, 12 nt, Artificial Sequence
  Synthetic
gccagccucggu

SEQ ID NO: 2421 - RNA, 12 nt, Artificial Sequence
  Synthetic
ccagccucggug

SEQ ID NO: 2422 - RNA, 12 nt, Artificial Sequence
  Synthetic
cagccucggugc

SEQ ID NO: 2423 - RNA, 12 nt, Artificial Sequence
  Synthetic
agccucggugcc

SEQ ID NO: 2424 - RNA, 12 nt, Artificial Sequence
  Synthetic
gccucggugcca

SEQ ID NO: 2425 - RNA, 12 nt, Artificial Sequence
  Synthetic
ccucggugccac

SEQ ID NO: 2426 - RNA, 12 nt, Artificial Sequence
  Synthetic
cucggugccacc

SEQ ID NO: 2427 - RNA, 12 nt, Artificial Sequence
  Synthetic
ucggugccaccg

SEQ ID NO: 2428 - RNA, 12 nt, Artificial Sequence
  Synthetic
cggugccaccgu

SEQ ID NO: 2429 - RNA, 12 nt, Artificial Sequence
  Synthetic
ggugccaccguc

SEQ ID NO: 2430 - RNA, 12 nt, Artificial Sequence
  Synthetic
gugccaccgucg

SEQ ID NO: 2431 - RNA, 12 nt, Artificial Sequence
  Synthetic
ugccaccgucgc

SEQ ID NO: 2432 - RNA, 12 nt, Artificial Sequence
  Synthetic
gccaccgucgcc

SEQ ID NO: 2433 - RNA, 12 nt, Artificial Sequence
  Synthetic
ccaccgucgccc

SEQ ID NO: 2434 - RNA, 12 nt, Artificial Sequence
  Synthetic
caccgucgcccu

SEQ ID NO: 2435 - RNA, 12 nt, Artificial Sequence
  Synthetic
accgucgcccuc

SEQ ID NO: 2436 - RNA, 12 nt, Artificial Sequence
  Synthetic
ccgucgcccucg

SEQ ID NO: 2437 - RNA, 12 nt, Artificial Sequence
  Synthetic
cgucgcccucgc

SEQ ID NO: 2438 - RNA, 12 nt, Artificial Sequence
  Synthetic
gucgcccucgcu

SEQ ID NO: 2439 - RNA, 12 nt, Artificial Sequence
  Synthetic
ucgcccucgcug

SEQ ID NO: 2440 - RNA, 12 nt, Artificial Sequence
  Synthetic
cgcccucgcugu

SEQ ID NO: 2441 - RNA, 12 nt, Artificial Sequence
  Synthetic
gcccucgcuguc

SEQ ID NO: 2442 - RNA, 12 nt, Artificial Sequence
  Synthetic
cccucgcuguca

SEQ ID NO: 2443 - RNA, 12 nt, Artificial Sequence
  Synthetic
ccucgcugucac

SEQ ID NO: 2444 - RNA, 12 nt, Artificial Sequence
  Synthetic
cucgcugucacg

SEQ ID NO: 2445 - RNA, 12 nt, Artificial Sequence
  Synthetic
ucgcugucacga

SEQ ID NO: 2446 - RNA, 12 nt, Artificial Sequence
  Synthetic
cgcugucacgac

SEQ ID NO: 2447 - RNA, 12 nt, Artificial Sequence
  Synthetic
gcugucacgaca

SEQ ID NO: 2448 - RNA, 12 nt, Artificial Sequence
  Synthetic
cugucacgacac

SEQ ID NO: 2449 - RNA, 12 nt, Artificial Sequence
  Synthetic
ugucacgacacu

SEQ ID NO: 2450 - RNA, 12 nt, Artificial Sequence
  Synthetic
gucacgacacuc

SEQ ID NO: 2451 - RNA, 12 nt, Artificial Sequence
  Synthetic
ucacgacacucc

SEQ ID NO: 2452 - RNA, 12 nt, Artificial Sequence
  Synthetic
cacgacacucca

SEQ ID NO: 2453 - RNA, 12 nt, Artificial Sequence
  Synthetic
acgacacuccag

SEQ ID NO: 2454 - RNA, 12 nt, Artificial Sequence
  Synthetic
cgacacuccagc

SEQ ID NO: 2455 - RNA, 12 nt, Artificial Sequence
  Synthetic
gacacuccagcc

SEQ ID NO: 2456 - RNA, 12 nt, Artificial Sequence
  Synthetic
acacuccagccc

SEQ ID NO: 2457 - RNA, 12 nt, Artificial Sequence
  Synthetic
cacuccagcccg

SEQ ID NO: 2458 - RNA, 12 nt, Artificial Sequence
  Synthetic
acuccagcccgc

SEQ ID NO: 2459 - RNA, 12 nt, Artificial Sequence
  Synthetic
cuccagcccgca

SEQ ID NO: 2460 - RNA, 12 nt, Artificial Sequence
  Synthetic
uccagcccgcac

SEQ ID NO: 2461 - RNA, 12 nt, Artificial Sequence
  Synthetic
ccagcccgcacc

SEQ ID NO: 2462 - RNA, 12 nt, Artificial Sequence
  Synthetic
cagcccgcacca

SEQ ID NO: 2463 - RNA, 12 nt, Artificial Sequence
  Synthetic
agcccgcaccag

SEQ ID NO: 2464 - RNA, 12 nt, Artificial Sequence
  Synthetic
gcccgcaccaga

SEQ ID NO: 2465 - RNA, 12 nt, Artificial Sequence
  Synthetic
cccgcaccagag

SEQ ID NO: 2466 - RNA, 12 nt, Artificial Sequence
  Synthetic
ccgcaccagagu

SEQ ID NO: 2467 - RNA, 12 nt, Artificial Sequence
  Synthetic
cgcaccagagug

SEQ ID NO: 2468 - RNA, 12 nt, Artificial Sequence
  Synthetic
gcaccagaguga

SEQ ID NO: 2469 - RNA, 12 nt, Artificial Sequence
  Synthetic
caccagagugag

SEQ ID NO: 2470 - RNA, 12 nt, Artificial Sequence
  Synthetic
accagagugagg

SEQ ID NO: 2471 - RNA, 12 nt, Artificial Sequence
  Synthetic
ccagagugagga

SEQ ID NO: 2472 - RNA, 12 nt, Artificial Sequence
  Synthetic
cagagugaggac

SEQ ID NO: 2473 - RNA, 12 nt, Artificial Sequence
  Synthetic
agagugaggacg

SEQ ID NO: 2474 - RNA, 12 nt, Artificial Sequence
  Synthetic
gagugaggacga

SEQ ID NO: 2475 - RNA, 12 nt, Artificial Sequence
  Synthetic
agugaggacgag

SEQ ID NO: 2476 - RNA, 12 nt, Artificial Sequence
  Synthetic
gugaggacgagg

SEQ ID NO: 2477 - RNA, 12 nt, Artificial Sequence
  Synthetic
ugaggacgagga

SEQ ID NO: 2478 - RNA, 12 nt, Artificial Sequence
  Synthetic
gaggacgaggag

SEQ ID NO: 2479 - RNA, 12 nt, Artificial Sequence
  Synthetic
aggacgaggagg

SEQ ID NO: 2480 - RNA, 12 nt, Artificial Sequence
  Synthetic
ggacgaggagga

SEQ ID NO: 2481 - RNA, 12 nt, Artificial Sequence
  Synthetic
gacgaggaggau

SEQ ID NO: 2482 - RNA, 12 nt, Artificial Sequence
  Synthetic
acgaggaggauc

SEQ ID NO: 2483 - RNA, 12 nt, Artificial Sequence
  Synthetic
cgaggaggaucc

SEQ ID NO: 2484 - RNA, 12 nt, Artificial Sequence
  Synthetic
gaggaggauccc

SEQ ID NO: 2485 - RNA, 12 nt, Artificial Sequence
  Synthetic
aggaggaucccc

SEQ ID NO: 2486 - RNA, 12 nt, Artificial Sequence
  Synthetic
ggaggauccccg

SEQ ID NO: 2487 - RNA, 12 nt, Artificial Sequence
  Synthetic
gaggauccccgg

SEQ ID NO: 2488 - RNA, 12 nt, Artificial Sequence
  Synthetic
aggauccccgga

SEQ ID NO: 2489 - RNA, 12 nt, Artificial Sequence
  Synthetic
ggauccccggaa

SEQ ID NO: 2490 - RNA, 12 nt, Artificial Sequence
  Synthetic
gauccccggaac

SEQ ID NO: 2491 - RNA, 12 nt, Artificial Sequence
  Synthetic
auccccggaacg

SEQ ID NO: 2492 - RNA, 12 nt, Artificial Sequence
  Synthetic
uccccggaacgg

SEQ ID NO: 2493 - RNA, 12 nt, Artificial Sequence
  Synthetic
ccccggaacggg

SEQ ID NO: 2494 - RNA, 12 nt, Artificial Sequence
  Synthetic
cccggaacgggc

SEQ ID NO: 2495 - RNA, 12 nt, Artificial Sequence
  Synthetic
ccggaacgggcc

SEQ ID NO: 2496 - RNA, 12 nt, Artificial Sequence
  Synthetic
cggaacgggccg

SEQ ID NO: 2497 - RNA, 12 nt, Artificial Sequence
  Synthetic
ggaacgggccgc

SEQ ID NO: 2498 - RNA, 12 nt, Artificial Sequence
  Synthetic
gaacgggccgcu

SEQ ID NO: 2499 - RNA, 12 nt, Artificial Sequence
  Synthetic
aacgggccgcug

SEQ ID NO: 2500 - RNA, 12 nt, Artificial Sequence
  Synthetic
acgggccgcugg

SEQ ID NO: 2501 - RNA, 12 nt, Artificial Sequence
  Synthetic
cgggccgcugga

SEQ ID NO: 2502 - RNA, 12 nt, Artificial Sequence
  Synthetic
gggccgcuggag

SEQ ID NO: 2503 - RNA, 12 nt, Artificial Sequence
  Synthetic
ggccgcuggagg

SEQ ID NO: 2504 - RNA, 12 nt, Artificial Sequence
  Synthetic
gccgcuggagga

SEQ ID NO: 2505 - RNA, 12 nt, Artificial Sequence
  Synthetic
ccgcuggaggaa

SEQ ID NO: 2506 - RNA, 12 nt, Artificial Sequence
  Synthetic
cgcuggaggaag

SEQ ID NO: 2507 - RNA, 12 nt, Artificial Sequence
  Synthetic
gcuggaggaaga

SEQ ID NO: 2508 - RNA, 12 nt, Artificial Sequence
  Synthetic
cuggaggaagac

SEQ ID NO: 2509 - RNA, 12 nt, Artificial Sequence
  Synthetic
uggaggaagacg

SEQ ID NO: 2510 - RNA, 12 nt, Artificial Sequence
  Synthetic
ggaggaagacgg

SEQ ID NO: 2511 - RNA, 12 nt, Artificial Sequence
  Synthetic
gaggaagacggc

SEQ ID NO: 2512 - RNA, 12 nt, Artificial Sequence
  Synthetic
aggaagacggcg

SEQ ID NO: 2513 - RNA, 12 nt, Artificial Sequence
  Synthetic
ggaagacggcga

SEQ ID NO: 2514 - RNA, 12 nt, Artificial Sequence
  Synthetic
gaagacggcgag

SEQ ID NO: 2515 - RNA, 12 nt, Artificial Sequence
  Synthetic
aagacggcgagc

SEQ ID NO: 2516 - RNA, 12 nt, Artificial Sequence
  Synthetic
agacggcgagcg

SEQ ID NO: 2517 - RNA, 12 nt, Artificial Sequence
  Synthetic
gacggcgagcgc

SEQ ID NO: 2518 - RNA, 12 nt, Artificial Sequence
  Synthetic
acggcgagcgcu

SEQ ID NO: 2519 - RNA, 12 nt, Artificial Sequence
  Synthetic
cggcgagcgcua

SEQ ID NO: 2520 - RNA, 12 nt, Artificial Sequence
  Synthetic
ggcgagcgcuac

SEQ ID NO: 2521 - RNA, 12 nt, Artificial Sequence
  Synthetic
gcgagcgcuacg

SEQ ID NO: 2522 - RNA, 12 nt, Artificial Sequence
  Synthetic
cgagcgcuacga

SEQ ID NO: 2523 - RNA, 12 nt, Artificial Sequence
  Synthetic
gagcgcuacgau

SEQ ID NO: 2524 - RNA, 12 nt, Artificial Sequence
  Synthetic
agcgcuacgaug

SEQ ID NO: 2525 - RNA, 12 nt, Artificial Sequence
  Synthetic
gcgcuacgauga

SEQ ID NO: 2526 - RNA, 12 nt, Artificial Sequence
  Synthetic
cgcuacgaugag

SEQ ID NO: 2527 - RNA, 12 nt, Artificial Sequence
  Synthetic
gcuacgaugagg

SEQ ID NO: 2528 - RNA, 12 nt, Artificial Sequence
  Synthetic
cuacgaugagga

SEQ ID NO: 2529 - RNA, 12 nt, Artificial Sequence
  Synthetic
uacgaugaggac

SEQ ID NO: 2530 - RNA, 12 nt, Artificial Sequence
  Synthetic
acgaugaggacg

SEQ ID NO: 2531 - RNA, 12 nt, Artificial Sequence
  Synthetic
cgaugaggacga

SEQ ID NO: 2532 - RNA, 12 nt, Artificial Sequence
  Synthetic
gaugaggacgag

SEQ ID NO: 2533 - RNA, 12 nt, Artificial Sequence
  Synthetic
augaggacgagg

SEQ ID NO: 2534 - RNA, 12 nt, Artificial Sequence
  Synthetic
ggacgaggaggc

SEQ ID NO: 2535 - RNA, 12 nt, Artificial Sequence
  Synthetic
gacgaggaggcc

SEQ ID NO: 2536 - RNA, 12 nt, Artificial Sequence
  Synthetic
acgaggaggccg

SEQ ID NO: 2537 - RNA, 12 nt, Artificial Sequence
  Synthetic
cgaggaggccgc

SEQ ID NO: 2538 - RNA, 12 nt, Artificial Sequence
  Synthetic
gaggaggccgcc

SEQ ID NO: 2539 - RNA, 12 nt, Artificial Sequence
  Synthetic
aggaggccgcca

SEQ ID NO: 2540 - RNA, 12 nt, Artificial Sequence
  Synthetic
ggaggccgccaa

SEQ ID NO: 2541 - RNA, 12 nt, Artificial Sequence
  Synthetic
gaggccgccaag

SEQ ID NO: 2542 - RNA, 12 nt, Artificial Sequence
  Synthetic
aggccgccaagg

SEQ ID NO: 2543 - RNA, 12 nt, Artificial Sequence
  Synthetic
ggccgccaagga

SEQ ID NO: 2544 - RNA, 12 nt, Artificial Sequence
  Synthetic
gccgccaaggac

SEQ ID NO: 2545 - RNA, 12 nt, Artificial Sequence
  Synthetic
ccgccaaggacc

SEQ ID NO: 2546 - RNA, 12 nt, Artificial Sequence
  Synthetic
cgccaaggaccg

SEQ ID NO: 2547 - RNA, 12 nt, Artificial Sequence
  Synthetic
gccaaggaccgg

SEQ ID NO: 2548 - RNA, 12 nt, Artificial Sequence
  Synthetic
ccaaggaccggc

SEQ ID NO: 2549 - RNA, 12 nt, Artificial Sequence
  Synthetic
caaggaccggcg

SEQ ID NO: 2550 - RNA, 12 nt, Artificial Sequence
  Synthetic
aaggaccggcgc

SEQ ID NO: 2551 - RNA, 12 nt, Artificial Sequence
  Synthetic
aggaccggcgca

SEQ ID NO: 2552 - RNA, 12 nt, Artificial Sequence
  Synthetic
ggaccggcgcaa

SEQ ID NO: 2553 - RNA, 12 nt, Artificial Sequence
  Synthetic
gaccggcgcaac

SEQ ID NO: 2554 - RNA, 12 nt, Artificial Sequence
  Synthetic
accggcgcaaca

SEQ ID NO: 2555 - RNA, 12 nt, Artificial Sequence
  Synthetic
ccggcgcaacau

SEQ ID NO: 2556 - RNA, 12 nt, Artificial Sequence
  Synthetic
cggcgcaacauc

SEQ ID NO: 2557 - RNA, 12 nt, Artificial Sequence
  Synthetic
ggcgcaacaucc

SEQ ID NO: 2558 - RNA, 12 nt, Artificial Sequence
  Synthetic
gcgcaacauccg

SEQ ID NO: 2559 - RNA, 12 nt, Artificial Sequence
  Synthetic
cgcaacauccgu

SEQ ID NO: 2560 - RNA, 12 nt, Artificial Sequence
  Synthetic
gcaacauccgug

SEQ ID NO: 2561 - RNA, 12 nt, Artificial Sequence
  Synthetic
caacauccgugc

SEQ ID NO: 2562 - RNA, 12 nt, Artificial Sequence
  Synthetic
aacauccgugca

SEQ ID NO: 2563 - RNA, 12 nt, Artificial Sequence
  Synthetic
acauccgugcac

SEQ ID NO: 2564 - RNA, 12 nt, Artificial Sequence
  Synthetic
cauccgugcacc

SEQ ID NO: 2565 - RNA, 12 nt, Artificial Sequence
  Synthetic
auccgugcacca

SEQ ID NO: 2566 - RNA, 12 nt, Artificial Sequence
  Synthetic
uccgugcaccag

SEQ ID NO: 2567 - RNA, 12 nt, Artificial Sequence
  Synthetic
ccgugcaccaga

SEQ ID NO: 2568 - RNA, 12 nt, Artificial Sequence
  Synthetic
cgugcaccagag

SEQ ID NO: 2569 - RNA, 12 nt, Artificial Sequence
  Synthetic
gugcaccagagu

SEQ ID NO: 2570 - RNA, 12 nt, Artificial Sequence
  Synthetic
ugcaccagagug

SEQ ID NO: 2571 - RNA, 12 nt, Artificial Sequence
  Synthetic
gcaccagagugg

SEQ ID NO: 2572 - RNA, 12 nt, Artificial Sequence
  Synthetic
caccagaguggc

SEQ ID NO: 2573 - RNA, 12 nt, Artificial Sequence
  Synthetic
accagaguggcc

SEQ ID NO: 2574 - RNA, 12 nt, Artificial Sequence
  Synthetic
ccagaguggccg

SEQ ID NO: 2575 - RNA, 12 nt, Artificial Sequence
  Synthetic
cagaguggccgc

SEQ ID NO: 2576 - RNA, 12 nt, Artificial Sequence
  Synthetic
agaguggccgcg

SEQ ID NO: 2577 - RNA, 12 nt, Artificial Sequence
  Synthetic
gaguggccgcgc

SEQ ID NO: 2578 - RNA, 12 nt, Artificial Sequence
  Synthetic
aguggccgcgcc

SEQ ID NO: 2579 - RNA, 12 nt, Artificial Sequence
  Synthetic
guggccgcgccg

SEQ ID NO: 2580 - RNA, 12 nt, Artificial Sequence
  Synthetic
uggccgcgccga

SEQ ID NO: 2581 - RNA, 12 nt, Artificial Sequence
  Synthetic
ggccgcgccgag

SEQ ID NO: 2582 - RNA, 12 nt, Artificial Sequence
  Synthetic
gccgcgccgagc

SEQ ID NO: 2583 - RNA, 12 nt, Artificial Sequence
  Synthetic
ccgcgccgagcg

SEQ ID NO: 2584 - RNA, 12 nt, Artificial Sequence
  Synthetic
cgcgccgagcgu

SEQ ID NO: 2585 - RNA, 12 nt, Artificial Sequence
  Synthetic
gcgccgagcguc

SEQ ID NO: 2586 - RNA, 12 nt, Artificial Sequence
  Synthetic
cgccgagcgucc

SEQ ID NO: 2587 - RNA, 12 nt, Artificial Sequence
  Synthetic
gccgagcguccu

SEQ ID NO: 2588 - RNA, 12 nt, Artificial Sequence
  Synthetic
ccgagcguccug

SEQ ID NO: 2589 - RNA, 12 nt, Artificial Sequence
  Synthetic
cgagcguccugc

SEQ ID NO: 2590 - RNA, 12 nt, Artificial Sequence
  Synthetic
gagcguccugca

SEQ ID NO: 2591 - RNA, 12 nt, Artificial Sequence
  Synthetic
agcguccugcac

SEQ ID NO: 2592 - RNA, 12 nt, Artificial Sequence
  Synthetic
gcguccugcacc

SEQ ID NO: 2593 - RNA, 12 nt, Artificial Sequence
  Synthetic
cguccugcaccu

SEQ ID NO: 2594 - RNA, 12 nt, Artificial Sequence
  Synthetic
guccugcaccuc

SEQ ID NO: 2595 - RNA, 12 nt, Artificial Sequence
  Synthetic
uccugcaccucc

SEQ ID NO: 2596 - RNA, 12 nt, Artificial Sequence
  Synthetic
ccugcaccuccu

SEQ ID NO: 2597 - RNA, 12 nt, Artificial Sequence
  Synthetic
cugcaccuccuc

SEQ ID NO: 2598 - RNA, 12 nt, Artificial Sequence
  Synthetic
ugcaccuccucc

SEQ ID NO: 2599 - RNA, 12 nt, Artificial Sequence
  Synthetic
gcaccuccucca

SEQ ID NO: 2600 - RNA, 12 nt, Artificial Sequence
  Synthetic
caccuccuccac

SEQ ID NO: 2601 - RNA, 12 nt, Artificial Sequence
  Synthetic
accuccuccacc

SEQ ID NO: 2602 - RNA, 12 nt, Artificial Sequence
  Synthetic
ccuccuccacca

SEQ ID NO: 2603 - RNA, 12 nt, Artificial Sequence
  Synthetic
cuccuccaccag

SEQ ID NO: 2604 - RNA, 12 nt, Artificial Sequence
  Synthetic
uccuccaccagc

SEQ ID NO: 2605 - RNA, 12 nt, Artificial Sequence
  Synthetic
ccuccaccagcg

SEQ ID NO: 2606 - RNA, 12 nt, Artificial Sequence
  Synthetic
cuccaccagcgg

SEQ ID NO: 2607 - RNA, 12 nt, Artificial Sequence
  Synthetic
uccaccagcggc

SEQ ID NO: 2608 - RNA, 12 nt, Artificial Sequence
  Synthetic
ccaccagcggca

SEQ ID NO: 2609 - RNA, 12 nt, Artificial Sequence
  Synthetic
caccagcggcag

SEQ ID NO: 2610 - RNA, 12 nt, Artificial Sequence
  Synthetic
accagcggcagc

SEQ ID NO: 2611 - RNA, 12 nt, Artificial Sequence
  Synthetic
ccagcggcagca

SEQ ID NO: 2612 - RNA, 12 nt, Artificial Sequence
  Synthetic
cagcggcagcaa

SEQ ID NO: 2613 - RNA, 12 nt, Artificial Sequence
  Synthetic
agcggcagcaag

SEQ ID NO: 2614 - RNA, 12 nt, Artificial Sequence
  Synthetic
gcggcagcaagc

SEQ ID NO: 2615 - RNA, 12 nt, Artificial Sequence
  Synthetic
cggcagcaagcg

SEQ ID NO: 2616 - RNA, 12 nt, Artificial Sequence
  Synthetic
ggcagcaagcgc

SEQ ID NO: 2617 - RNA, 12 nt, Artificial Sequence
  Synthetic
gcagcaagcgca

SEQ ID NO: 2618 - RNA, 12 nt, Artificial Sequence
  Synthetic
cagcaagcgcaa

SEQ ID NO: 2619 - RNA, 12 nt, Artificial Sequence
  Synthetic
agcaagcgcaac

SEQ ID NO: 2620 - RNA, 12 nt, Artificial Sequence
  Synthetic
gcaagcgcaacu

SEQ ID NO: 2621 - RNA, 12 nt, Artificial Sequence
  Synthetic
caagcgcaacuc

SEQ ID NO: 2622 - RNA, 12 nt, Artificial Sequence
  Synthetic
aagcgcaacucu

SEQ ID NO: 2623 - RNA, 12 nt, Artificial Sequence
  Synthetic
agcgcaacucug

SEQ ID NO: 2624 - RNA, 12 nt, Artificial Sequence
  Synthetic
gcgcaacucugu

SEQ ID NO: 2625 - RNA, 12 nt, Artificial Sequence
  Synthetic
cgcaacucugug

SEQ ID NO: 2626 - RNA, 12 nt, Artificial Sequence
  Synthetic
gcaacucugugg

SEQ ID NO: 2627 - RNA, 12 nt, Artificial Sequence
  Synthetic
caacucugugga

SEQ ID NO: 2628 - RNA, 12 nt, Artificial Sequence
  Synthetic
aacucuguggac

SEQ ID NO: 2629 - RNA, 12 nt, Artificial Sequence
  Synthetic
acucuguggaca

SEQ ID NO: 2630 - RNA, 12 nt, Artificial Sequence
  Synthetic
cucuguggacac

SEQ ID NO: 2631 - RNA, 12 nt, Artificial Sequence
  Synthetic
ucuguggacacg

SEQ ID NO: 2632 - RNA, 12 nt, Artificial Sequence
  Synthetic
cuguggacacgg

SEQ ID NO: 2633 - RNA, 12 nt, Artificial Sequence
  Synthetic
uguggacacggc

SEQ ID NO: 2634 - RNA, 12 nt, Artificial Sequence
  Synthetic
guggacacggcc

SEQ ID NO: 2635 - RNA, 12 nt, Artificial Sequence
  Synthetic
uggacacggcca

SEQ ID NO: 2636 - RNA, 12 nt, Artificial Sequence
  Synthetic
ggacacggccac

SEQ ID NO: 2637 - RNA, 12 nt, Artificial Sequence
  Synthetic
gacacggccacc

SEQ ID NO: 2638 - RNA, 12 nt, Artificial Sequence
  Synthetic
acacggccaccu

SEQ ID NO: 2639 - RNA, 12 nt, Artificial Sequence
  Synthetic
cacggccaccuc

SEQ ID NO: 2640 - RNA, 12 nt, Artificial Sequence
  Synthetic
acggccaccucc

SEQ ID NO: 2641 - RNA, 12 nt, Artificial Sequence
  Synthetic
cggccaccucca

SEQ ID NO: 2642 - RNA, 12 nt, Artificial Sequence
  Synthetic
ggccaccuccag

SEQ ID NO: 2643 - RNA, 12 nt, Artificial Sequence
  Synthetic
gccaccuccagc

SEQ ID NO: 2644 - RNA, 12 nt, Artificial Sequence
  Synthetic
ccaccuccagcu

SEQ ID NO: 2645 - RNA, 12 nt, Artificial Sequence
  Synthetic
caccuccagcuc

SEQ ID NO: 2646 - RNA, 12 nt, Artificial Sequence
  Synthetic
accuccagcuca

SEQ ID NO: 2647 - RNA, 12 nt, Artificial Sequence
  Synthetic
ccuccagcucac

SEQ ID NO: 2648 - RNA, 12 nt, Artificial Sequence
  Synthetic
cuccagcucacu

SEQ ID NO: 2649 - RNA, 12 nt, Artificial Sequence
  Synthetic
uccagcucacuc

SEQ ID NO: 2650 - RNA, 12 nt, Artificial Sequence
  Synthetic
ccagcucacuca

SEQ ID NO: 2651 - RNA, 12 nt, Artificial Sequence
  Synthetic
cagcucacucag

SEQ ID NO: 2652 - RNA, 12 nt, Artificial Sequence
  Synthetic
agcucacucagc

SEQ ID NO: 2653 - RNA, 12 nt, Artificial Sequence
  Synthetic
gcucacucagca

SEQ ID NO: 2654 - RNA, 12 nt, Artificial Sequence
  Synthetic
cucacucagcac

SEQ ID NO: 2655 - RNA, 12 nt, Artificial Sequence
  Synthetic
ucacucagcacc

SEQ ID NO: 2656 - RNA, 12 nt, Artificial Sequence
  Synthetic
cacucagcaccc

SEQ ID NO: 2657 - RNA, 12 nt, Artificial Sequence
  Synthetic
acucagcacccc

SEQ ID NO: 2658 - RNA, 12 nt, Artificial Sequence
  Synthetic
cucagcaccccg

SEQ ID NO: 2659 - RNA, 12 nt, Artificial Sequence
  Synthetic
ucagcaccccga

SEQ ID NO: 2660 - RNA, 12 nt, Artificial Sequence
  Synthetic
cagcaccccgag

SEQ ID NO: 2661 - RNA, 12 nt, Artificial Sequence
  Synthetic
agcaccccgagc

SEQ ID NO: 2662 - RNA, 12 nt, Artificial Sequence
  Synthetic
gcaccccgagcg

SEQ ID NO: 2663 - RNA, 12 nt, Artificial Sequence
  Synthetic
caccccgagcga

SEQ ID NO: 2664 - RNA, 12 nt, Artificial Sequence
  Synthetic
accccgagcgag

SEQ ID NO: 2665 - RNA, 12 nt, Artificial Sequence
  Synthetic
ccccgagcgagc

SEQ ID NO: 2666 - RNA, 12 nt, Artificial Sequence
  Synthetic
cccgagcgagcc

SEQ ID NO: 2667 - RNA, 12 nt, Artificial Sequence
  Synthetic
ccgagcgagccc

SEQ ID NO: 2668 - RNA, 12 nt, Artificial Sequence
  Synthetic
cgagcgagcccc

SEQ ID NO: 2669 - RNA, 12 nt, Artificial Sequence
  Synthetic
gagcgagccccu

SEQ ID NO: 2670 - RNA, 12 nt, Artificial Sequence
  Synthetic
agcgagccccuc

SEQ ID NO: 2671 - RNA, 12 nt, Artificial Sequence
  Synthetic
gcgagccccuca

SEQ ID NO: 2672 - RNA, 12 nt, Artificial Sequence
  Synthetic
cgagccccucag

SEQ ID NO: 2673 - RNA, 12 nt, Artificial Sequence
  Synthetic
gagccccucagc

SEQ ID NO: 2674 - RNA, 12 nt, Artificial Sequence
  Synthetic
agccccucagcc

SEQ ID NO: 2675 - RNA, 12 nt, Artificial Sequence
  Synthetic
gccccucagccc

SEQ ID NO: 2676 - RNA, 12 nt, Artificial Sequence
  Synthetic
ccccucagcccc

SEQ ID NO: 2677 - RNA, 12 nt, Artificial Sequence
  Synthetic
cccucagcccca

SEQ ID NO: 2678 - RNA, 12 nt, Artificial Sequence
  Synthetic
ccucagccccac

SEQ ID NO: 2679 - RNA, 12 nt, Artificial Sequence
  Synthetic
cucagccccacc

SEQ ID NO: 2680 - RNA, 12 nt, Artificial Sequence
  Synthetic
ucagccccacca

SEQ ID NO: 2681 - RNA, 12 nt, Artificial Sequence
  Synthetic
cagccccaccag

SEQ ID NO: 2682 - RNA, 12 nt, Artificial Sequence
  Synthetic
agccccaccagc

SEQ ID NO: 2683 - RNA, 12 nt, Artificial Sequence
  Synthetic
gccccaccagcu

SEQ ID NO: 2684 - RNA, 12 nt, Artificial Sequence
  Synthetic
ccccaccagcuc

SEQ ID NO: 2685 - RNA, 12 nt, Artificial Sequence
  Synthetic
cccaccagcucc

SEQ ID NO: 2686 - RNA, 12 nt, Artificial Sequence
  Synthetic
ccaccagcuccc

SEQ ID NO: 2687 - RNA, 12 nt, Artificial Sequence
  Synthetic
caccagcucccu

SEQ ID NO: 2688 - RNA, 12 nt, Artificial Sequence
  Synthetic
accagcucccug

SEQ ID NO: 2689 - RNA, 12 nt, Artificial Sequence
  Synthetic
ccagcucccugg

SEQ ID NO: 2690 - RNA, 12 nt, Artificial Sequence
  Synthetic
cagcucccuggg

SEQ ID NO: 2691 - RNA, 12 nt, Artificial Sequence
  Synthetic
agcucccugggc

SEQ ID NO: 2692 - RNA, 12 nt, Artificial Sequence
  Synthetic
gcucccugggcg

SEQ ID NO: 2693 - RNA, 12 nt, Artificial Sequence
  Synthetic
cucccugggcga

SEQ ID NO: 2694 - RNA, 12 nt, Artificial Sequence
  Synthetic
ucccugggcgag

SEQ ID NO: 2695 - RNA, 12 nt, Artificial Sequence
  Synthetic
cccugggcgagg

SEQ ID NO: 2696 - RNA, 12 nt, Artificial Sequence
  Synthetic
ccugggcgagga

SEQ ID NO: 2697 - RNA, 12 nt, Artificial Sequence
  Synthetic
cugggcgaggag

SEQ ID NO: 2698 - RNA, 12 nt, Artificial Sequence
  Synthetic
ugggcgaggagc

SEQ ID NO: 2699 - RNA, 12 nt, Artificial Sequence
  Synthetic
gggcgaggagcg

SEQ ID NO: 2700 - RNA, 12 nt, Artificial Sequence
  Synthetic
ggcgaggagcgu

SEQ ID NO: 2701 - RNA, 12 nt, Artificial Sequence
  Synthetic
gcgaggagcgua

SEQ ID NO: 2702 - RNA, 12 nt, Artificial Sequence
  Synthetic
cgaggagcguaa

SEQ ID NO: 2703 - RNA, 12 nt, Artificial Sequence
  Synthetic
gaggagcguaac

SEQ ID NO: 2704 - RNA, 12 nt, Artificial Sequence
  Synthetic
aggagcguaacu

SEQ ID NO: 2705 - RNA, 12 nt, Artificial Sequence
  Synthetic
ggagcguaacua

SEQ ID NO: 2706 - RNA, 12 nt, Artificial Sequence
  Synthetic
gagcguaacuaa

SEQ ID NO: 2707 - RNA, 12 nt, Artificial Sequence
  Synthetic
agcguaacuaag

SEQ ID NO: 2708 - RNA, 12 nt, Artificial Sequence
  Synthetic
gcguaacuaagu

SEQ ID NO: 2709 - RNA, 12 nt, Artificial Sequence
  Synthetic
cguaacuaaguc

SEQ ID NO: 2710 - RNA, 12 nt, Artificial Sequence
  Synthetic
guaacuaagucc

SEQ ID NO: 2711 - RNA, 12 nt, Artificial Sequence
  Synthetic
uaacuaaguccg

SEQ ID NO: 2712 - RNA, 12 nt, Artificial Sequence
  Synthetic
aacuaaguccgc

SEQ ID NO: 2713 - RNA, 12 nt, Artificial Sequence
  Synthetic
acuaaguccgcc

SEQ ID NO: 2714 - RNA, 12 nt, Artificial Sequence
  Synthetic
cuaaguccgccc

SEQ ID NO: 2715 - RNA, 12 nt, Artificial Sequence
  Synthetic
uaaguccgcccc

SEQ ID NO: 2716 - RNA, 12 nt, Artificial Sequence
  Synthetic
aaguccgcccca

SEQ ID NO: 2717 - RNA, 12 nt, Artificial Sequence
  Synthetic
aguccgccccac

SEQ ID NO: 2718 - RNA, 12 nt, Artificial Sequence
  Synthetic
guccgccccacc

SEQ ID NO: 2719 - RNA, 12 nt, Artificial Sequence
  Synthetic
uccgccccacca

SEQ ID NO: 2720 - RNA, 12 nt, Artificial Sequence
  Synthetic
ccgccccaccac

SEQ ID NO: 2721 - RNA, 12 nt, Artificial Sequence
  Synthetic
cgccccaccaca

SEQ ID NO: 2722 - RNA, 12 nt, Artificial Sequence
  Synthetic
gccccaccacac

SEQ ID NO: 2723 - RNA, 12 nt, Artificial Sequence
  Synthetic
ccccaccacacu

SEQ ID NO: 2724 - RNA, 12 nt, Artificial Sequence
  Synthetic
cccaccacacuc

SEQ ID NO: 2725 - RNA, 12 nt, Artificial Sequence
  Synthetic
ccaccacacucc

SEQ ID NO: 2726 - RNA, 12 nt, Artificial Sequence
  Synthetic
caccacacuccc

SEQ ID NO: 2727 - RNA, 12 nt, Artificial Sequence
  Synthetic
accacacucccc

SEQ ID NO: 2728 - RNA, 12 nt, Artificial Sequence
  Synthetic
ccacacuccccg

SEQ ID NO: 2729 - RNA, 12 nt, Artificial Sequence
  Synthetic
cacacuccccgc

SEQ ID NO: 2730 - RNA, 12 nt, Artificial Sequence
  Synthetic
acacuccccgcc

SEQ ID NO: 2731 - RNA, 12 nt, Artificial Sequence
  Synthetic
cacuccccgccu

SEQ ID NO: 2732 - RNA, 12 nt, Artificial Sequence
  Synthetic
acuccccgccug

SEQ ID NO: 2733 - RNA, 12 nt, Artificial Sequence
  Synthetic
cuccccgccugu

SEQ ID NO: 2734 - RNA, 12 nt, Artificial Sequence
  Synthetic
uccccgccuguc

SEQ ID NO: 2735 - RNA, 12 nt, Artificial Sequence
  Synthetic
ccccgccugucc

SEQ ID NO: 2736 - RNA, 12 nt, Artificial Sequence
  Synthetic
cccgccuguccu

SEQ ID NO: 2737 - RNA, 12 nt, Artificial Sequence
  Synthetic
ccgccuguccug

SEQ ID NO: 2738 - RNA, 12 nt, Artificial Sequence
  Synthetic
cgccuguccugc

SEQ ID NO: 2739 - RNA, 12 nt, Artificial Sequence
  Synthetic
gccuguccugcc

SEQ ID NO: 2740 - RNA, 12 nt, Artificial Sequence
  Synthetic
ccuguccugccu

SEQ ID NO: 2741 - RNA, 12 nt, Artificial Sequence
  Synthetic
cuguccugccuc

SEQ ID NO: 2742 - RNA, 12 nt, Artificial Sequence
  Synthetic
uguccugccucu

SEQ ID NO: 2743 - RNA, 12 nt, Artificial Sequence
  Synthetic
guccugccucuc

SEQ ID NO: 2744 - RNA, 12 nt, Artificial Sequence
  Synthetic
uccugccucucu

SEQ ID NO: 2745 - RNA, 12 nt, Artificial Sequence
  Synthetic
ccugccucucug

SEQ ID NO: 2746 - RNA, 12 nt, Artificial Sequence
  Synthetic
cugccucucugc

SEQ ID NO: 2747 - RNA, 12 nt, Artificial Sequence
  Synthetic
ugccucucugcu

SEQ ID NO: 2748 - RNA, 12 nt, Artificial Sequence
  Synthetic
gccucucugcuc

SEQ ID NO: 2749 - RNA, 12 nt, Artificial Sequence
  Synthetic
ccucucugcucc

SEQ ID NO: 2750 - RNA, 12 nt, Artificial Sequence
  Synthetic
cucucugcucca

SEQ ID NO: 2751 - RNA, 12 nt, Artificial Sequence
  Synthetic
ucucugcuccag

SEQ ID NO: 2752 - RNA, 12 nt, Artificial Sequence
  Synthetic
cucugcuccaga

SEQ ID NO: 2753 - RNA, 12 nt, Artificial Sequence
  Synthetic
ucugcuccagag

SEQ ID NO: 2754 - RNA, 12 nt, Artificial Sequence
  Synthetic
cugcuccagaga

SEQ ID NO: 2755 - RNA, 12 nt, Artificial Sequence
  Synthetic
ugcuccagagag

SEQ ID NO: 2756 - RNA, 12 nt, Artificial Sequence
  Synthetic
gcuccagagaga

SEQ ID NO: 2757 - RNA, 12 nt, Artificial Sequence
  Synthetic
cuccagagagag

SEQ ID NO: 2758 - RNA, 12 nt, Artificial Sequence
  Synthetic
uccagagagagg

SEQ ID NO: 2759 - RNA, 12 nt, Artificial Sequence
  Synthetic
ccagagagagga

SEQ ID NO: 2760 - RNA, 12 nt, Artificial Sequence
  Synthetic
cagagagaggau

SEQ ID NO: 2761 - RNA, 12 nt, Artificial Sequence
  Synthetic
agagagaggaug

SEQ ID NO: 2762 - RNA, 12 nt, Artificial Sequence
  Synthetic
gagagaggaugc

SEQ ID NO: 2763 - RNA, 12 nt, Artificial Sequence
  Synthetic
agagaggaugca

SEQ ID NO: 2764 - RNA, 12 nt, Artificial Sequence
  Synthetic
gagaggaugcag

SEQ ID NO: 2765 - RNA, 12 nt, Artificial Sequence
  Synthetic
agaggaugcaga

SEQ ID NO: 2766 - RNA, 12 nt, Artificial Sequence
  Synthetic
gaggaugcagag

SEQ ID NO: 2767 - RNA, 12 nt, Artificial Sequence
  Synthetic
aggaugcagagg

SEQ ID NO: 2768 - RNA, 12 nt, Artificial Sequence
  Synthetic
ggaugcagaggg

SEQ ID NO: 2769 - RNA, 12 nt, Artificial Sequence
  Synthetic
gaugcagagggg

SEQ ID NO: 2770 - RNA, 12 nt, Artificial Sequence
  Synthetic
augcagaggggu

SEQ ID NO: 2771 - RNA, 12 nt, Artificial Sequence
  Synthetic
ugcagaggggug

SEQ ID NO: 2772 - RNA, 12 nt, Artificial Sequence
  Synthetic
gcagaggggugc

SEQ ID NO: 2773 - RNA, 12 nt, Artificial Sequence
  Synthetic
cagaggggugcu

SEQ ID NO: 2774 - RNA, 12 nt, Artificial Sequence
  Synthetic
agaggggugcug

SEQ ID NO: 2775 - RNA, 12 nt, Artificial Sequence
  Synthetic
gaggggugcugc

SEQ ID NO: 2776 - RNA, 12 nt, Artificial Sequence
  Synthetic
aggggugcugcu

SEQ ID NO: 2777 - RNA, 12 nt, Artificial Sequence
  Synthetic
ggggugcugcuc

SEQ ID NO: 2778 - RNA, 12 nt, Artificial Sequence
  Synthetic
gggugcugcucc

SEQ ID NO: 2779 - RNA, 12 nt, Artificial Sequence
  Synthetic
ggugcugcuccu

SEQ ID NO: 2780 - RNA, 12 nt, Artificial Sequence
  Synthetic
gugcugcuccua

SEQ ID NO: 2781 - RNA, 12 nt, Artificial Sequence
  Synthetic
ugcugcuccuaa

SEQ ID NO: 2782 - RNA, 12 nt, Artificial Sequence
  Synthetic
gcugcuccuaaa

SEQ ID NO: 2783 - RNA, 12 nt, Artificial Sequence
  Synthetic
cugcuccuaaac

SEQ ID NO: 2784 - RNA, 12 nt, Artificial Sequence
  Synthetic
ugcuccuaaacc

SEQ ID NO: 2785 - RNA, 12 nt, Artificial Sequence
  Synthetic
gcuccuaaaccc

SEQ ID NO: 2786 - RNA, 12 nt, Artificial Sequence
  Synthetic
cuccuaaacccc

SEQ ID NO: 2787 - RNA, 12 nt, Artificial Sequence
  Synthetic
uccuaaaccccc

SEQ ID NO: 2788 - RNA, 12 nt, Artificial Sequence
  Synthetic
ccuaaacccccg

SEQ ID NO: 2789 - RNA, 12 nt, Artificial Sequence
  Synthetic
cuaaacccccgc

SEQ ID NO: 2790 - RNA, 12 nt, Artificial Sequence
  Synthetic
uaaacccccgcu

SEQ ID NO: 2791 - RNA, 12 nt, Artificial Sequence
  Synthetic
aaacccccgcuc

SEQ ID NO: 2792 - RNA, 12 nt, Artificial Sequence
  Synthetic
aacccccgcucc

SEQ ID NO: 2793 - RNA, 12 nt, Artificial Sequence
  Synthetic
acccccgcucca

SEQ ID NO: 2794 - RNA, 12 nt, Artificial Sequence
  Synthetic
cccccgcuccag

SEQ ID NO: 2795 - RNA, 12 nt, Artificial Sequence
  Synthetic
ccccgcuccaga

SEQ ID NO: 2796 - RNA, 12 nt, Artificial Sequence
  Synthetic
cccgcuccagau

SEQ ID NO: 2797 - RNA, 12 nt, Artificial Sequence
  Synthetic
ccgcuccagauc

SEQ ID NO: 2798 - RNA, 12 nt, Artificial Sequence
  Synthetic
cgcuccagaucu

SEQ ID NO: 2799 - RNA, 12 nt, Artificial Sequence
  Synthetic
gcuccagaucug

SEQ ID NO: 2800 - RNA, 12 nt, Artificial Sequence
  Synthetic
cuccagaucugc

SEQ ID NO: 2801 - RNA, 12 nt, Artificial Sequence
  Synthetic
uccagaucugca

SEQ ID NO: 2802 - RNA, 12 nt, Artificial Sequence
  Synthetic
ccagaucugcac

SEQ ID NO: 2803 - RNA, 12 nt, Artificial Sequence
  Synthetic
cagaucugcacu

SEQ ID NO: 2804 - RNA, 12 nt, Artificial Sequence
  Synthetic
agaucugcacug

SEQ ID NO: 2805 - RNA, 12 nt, Artificial Sequence
  Synthetic
gaucugcacugg

SEQ ID NO: 2806 - RNA, 12 nt, Artificial Sequence
  Synthetic
aucugcacuggg

SEQ ID NO: 2807 - RNA, 12 nt, Artificial Sequence
  Synthetic
ucugcacugggu

SEQ ID NO: 2808 - RNA, 12 nt, Artificial Sequence
  Synthetic
cugcacugggug

SEQ ID NO: 2809 - RNA, 12 nt, Artificial Sequence
  Synthetic
ugcacugggugu

SEQ ID NO: 2810 - RNA, 12 nt, Artificial Sequence
  Synthetic
gcacugggugug

SEQ ID NO: 2811 - RNA, 12 nt, Artificial Sequence
  Synthetic
cacugggugugg

SEQ ID NO: 2812 - RNA, 12 nt, Artificial Sequence
  Synthetic
acuggguguggc

SEQ ID NO: 2813 - RNA, 12 nt, Artificial Sequence
  Synthetic
cuggguguggcc

SEQ ID NO: 2814 - RNA, 12 nt, Artificial Sequence
  Synthetic
uggguguggccc

SEQ ID NO: 2815 - RNA, 12 nt, Artificial Sequence
  Synthetic
ggguguggcccc

SEQ ID NO: 2816 - RNA, 12 nt, Artificial Sequence
  Synthetic
gguguggccccg

SEQ ID NO: 2817 - RNA, 12 nt, Artificial Sequence
  Synthetic
guguggccccgc

SEQ ID NO: 2818 - RNA, 12 nt, Artificial Sequence
  Synthetic
uguggccccgca

SEQ ID NO: 2819 - RNA, 12 nt, Artificial Sequence
  Synthetic
guggccccgcag

SEQ ID NO: 2820 - RNA, 12 nt, Artificial Sequence
  Synthetic
uggccccgcagu

SEQ ID NO: 2821 - RNA, 12 nt, Artificial Sequence
  Synthetic
ggccccgcagug

SEQ ID NO: 2822 - RNA, 12 nt, Artificial Sequence
  Synthetic
gccccgcagugc

SEQ ID NO: 2823 - RNA, 12 nt, Artificial Sequence
  Synthetic
ccccgcagugcc

SEQ ID NO: 2824 - RNA, 12 nt, Artificial Sequence
  Synthetic
cccgcagugccc

SEQ ID NO: 2825 - RNA, 12 nt, Artificial Sequence
  Synthetic
ccgcagugcccc

SEQ ID NO: 2826 - RNA, 12 nt, Artificial Sequence
  Synthetic
cgcagugccccc

SEQ ID NO: 2827 - RNA, 12 nt, Artificial Sequence
  Synthetic
gcagugccccca

SEQ ID NO: 2828 - RNA, 12 nt, Artificial Sequence
  Synthetic
cagugcccccac

SEQ ID NO: 2829 - RNA, 12 nt, Artificial Sequence
  Synthetic
agugcccccacc

SEQ ID NO: 2830 - RNA, 12 nt, Artificial Sequence
  Synthetic
gugcccccaccc

SEQ ID NO: 2831 - RNA, 12 nt, Artificial Sequence
  Synthetic
ugcccccaccca

SEQ ID NO: 2832 - RNA, 12 nt, Artificial Sequence
  Synthetic
gcccccacccag

SEQ ID NO: 2833 - RNA, 12 nt, Artificial Sequence
  Synthetic
cccccacccagu

SEQ ID NO: 2834 - RNA, 12 nt, Artificial Sequence
  Synthetic
ccccacccaguc

SEQ ID NO: 2835 - RNA, 12 nt, Artificial Sequence
  Synthetic
cccacccagucc

SEQ ID NO: 2836 - RNA, 12 nt, Artificial Sequence
  Synthetic
ccacccaguccg

SEQ ID NO: 2837 - RNA, 12 nt, Artificial Sequence
  Synthetic
cacccaguccgc

SEQ ID NO: 2838 - RNA, 12 nt, Artificial Sequence
  Synthetic
acccaguccgcc

SEQ ID NO: 2839 - RNA, 12 nt, Artificial Sequence
  Synthetic
cccaguccgcca

SEQ ID NO: 2840 - RNA, 12 nt, Artificial Sequence
  Synthetic
ccaguccgccaa

SEQ ID NO: 2841 - RNA, 12 nt, Artificial Sequence
  Synthetic
caguccgccaaa

SEQ ID NO: 2842 - RNA, 12 nt, Artificial Sequence
  Synthetic
aguccgccaaac

SEQ ID NO: 2843 - RNA, 12 nt, Artificial Sequence
  Synthetic
guccgccaaaca

SEQ ID NO: 2844 - RNA, 12 nt, Artificial Sequence
  Synthetic
uccgccaaacac

SEQ ID NO: 2845 - RNA, 12 nt, Artificial Sequence
  Synthetic
ccgccaaacacu

SEQ ID NO: 2846 - RNA, 12 nt, Artificial Sequence
  Synthetic
cgccaaacacuc

SEQ ID NO: 2847 - RNA, 12 nt, Artificial Sequence
  Synthetic
gccaaacacucc

SEQ ID NO: 2848 - RNA, 12 nt, Artificial Sequence
  Synthetic
ccaaacacucca

SEQ ID NO: 2849 - RNA, 12 nt, Artificial Sequence
  Synthetic
caaacacuccac

SEQ ID NO: 2850 - RNA, 12 nt, Artificial Sequence
  Synthetic
aaacacuccacc

SEQ ID NO: 2851 - RNA, 12 nt, Artificial Sequence
  Synthetic
aacacuccaccc

SEQ ID NO: 2852 - RNA, 12 nt, Artificial Sequence
  Synthetic
acacuccacccc

SEQ ID NO: 2853 - RNA, 12 nt, Artificial Sequence
  Synthetic
cacuccaccccc

SEQ ID NO: 2854 - RNA, 12 nt, Artificial Sequence
  Synthetic
acuccacccccu

SEQ ID NO: 2855 - RNA, 12 nt, Artificial Sequence
  Synthetic
cuccacccccuc

SEQ ID NO: 2856 - RNA, 12 nt, Artificial Sequence
  Synthetic
uccacccccucc

SEQ ID NO: 2857 - RNA, 12 nt, Artificial Sequence
  Synthetic
ccacccccucca

SEQ ID NO: 2858 - RNA, 12 nt, Artificial Sequence
  Synthetic
cacccccuccag

SEQ ID NO: 2859 - RNA, 12 nt, Artificial Sequence
  Synthetic
acccccuccagc

SEQ ID NO: 2860 - RNA, 12 nt, Artificial Sequence
  Synthetic
cccccuccagcu

SEQ ID NO: 2861 - RNA, 12 nt, Artificial Sequence
  Synthetic
ccccuccagcuc

SEQ ID NO: 2862 - RNA, 12 nt, Artificial Sequence
  Synthetic
cccuccagcucc

SEQ ID NO: 2863 - RNA, 12 nt, Artificial Sequence
  Synthetic
ccuccagcucca

SEQ ID NO: 2864 - RNA, 12 nt, Artificial Sequence
  Synthetic
cuccagcuccag

SEQ ID NO: 2865 - RNA, 12 nt, Artificial Sequence
  Synthetic
uccagcuccagu

SEQ ID NO: 2866 - RNA, 12 nt, Artificial Sequence
  Synthetic
ccagcuccaguu

SEQ ID NO: 2867 - RNA, 12 nt, Artificial Sequence
  Synthetic
cagcuccaguuu

SEQ ID NO: 2868 - RNA, 12 nt, Artificial Sequence
  Synthetic
agcuccaguuuc

SEQ ID NO: 2869 - RNA, 12 nt, Artificial Sequence
  Synthetic
gcuccaguuucc

SEQ ID NO: 2870 - RNA, 12 nt, Artificial Sequence
  Synthetic
cuccaguuucca

SEQ ID NO: 2871 - RNA, 12 nt, Artificial Sequence
  Synthetic
uccaguuuccaa

SEQ ID NO: 2872 - RNA, 12 nt, Artificial Sequence
  Synthetic
ccaguuuccaag

SEQ ID NO: 2873 - RNA, 12 nt, Artificial Sequence
  Synthetic
caguuuccaagu

SEQ ID NO: 2874 - RNA, 12 nt, Artificial Sequence
  Synthetic
aguuuccaaguu

SEQ ID NO: 2875 - RNA, 12 nt, Artificial Sequence
  Synthetic
guuuccaaguuc

SEQ ID NO: 2876 - RNA, 12 nt, Artificial Sequence
  Synthetic
uuuccaaguucc

SEQ ID NO: 2877 - RNA, 12 nt, Artificial Sequence
  Synthetic
uuccaaguuccu

SEQ ID NO: 2878 - RNA, 12 nt, Artificial Sequence
  Synthetic
uccaaguuccug

SEQ ID NO: 2879 - RNA, 12 nt, Artificial Sequence
  Synthetic
ccaaguuccugc

SEQ ID NO: 2880 - RNA, 12 nt, Artificial Sequence
  Synthetic
caaguuccugca

SEQ ID NO: 2881 - RNA, 12 nt, Artificial Sequence
  Synthetic
aaguuccugcac

SEQ ID NO: 2882 - RNA, 12 nt, Artificial Sequence
  Synthetic
aguuccugcacu

SEQ ID NO: 2883 - RNA, 12 nt, Artificial Sequence
  Synthetic
guuccugcacuc

SEQ ID NO: 2884 - RNA, 12 nt, Artificial Sequence
  Synthetic
uuccugcacucc

SEQ ID NO: 2885 - RNA, 12 nt, Artificial Sequence
  Synthetic
uccugcacucca

SEQ ID NO: 2886 - RNA, 12 nt, Artificial Sequence
  Synthetic
ccugcacuccag

SEQ ID NO: 2887 - RNA, 12 nt, Artificial Sequence
  Synthetic
cugcacuccaga

SEQ ID NO: 2888 - RNA, 12 nt, Artificial Sequence
  Synthetic
ugcacuccagaa

SEQ ID NO: 2889 - RNA, 12 nt, Artificial Sequence
  Synthetic
gcacuccagaau

SEQ ID NO: 2890 - RNA, 12 nt, Artificial Sequence
  Synthetic
cacuccagaauc

SEQ ID NO: 2891 - RNA, 12 nt, Artificial Sequence
  Synthetic
acuccagaaucc

SEQ ID NO: 2892 - RNA, 12 nt, Artificial Sequence
  Synthetic
cuccagaaucca

SEQ ID NO: 2893 - RNA, 12 nt, Artificial Sequence
  Synthetic
uccagaauccac

SEQ ID NO: 2894 - RNA, 12 nt, Artificial Sequence
  Synthetic
ccagaauccaca

SEQ ID NO: 2895 - RNA, 12 nt, Artificial Sequence
  Synthetic
cagaauccacaa

SEQ ID NO: 2896 - RNA, 12 nt, Artificial Sequence
  Synthetic
agaauccacaaa

SEQ ID NO: 2897 - RNA, 12 nt, Artificial Sequence
  Synthetic
gaauccacaaag

SEQ ID NO: 2898 - RNA, 12 nt, Artificial Sequence
  Synthetic
aauccacaaagc

SEQ ID NO: 2899 - RNA, 12 nt, Artificial Sequence
  Synthetic
auccacaaagcc

SEQ ID NO: 2900 - RNA, 12 nt, Artificial Sequence
  Synthetic
uccacaaagccg

SEQ ID NO: 2901 - RNA, 12 nt, Artificial Sequence
  Synthetic
ccacaaagccgu

SEQ ID NO: 2902 - RNA, 12 nt, Artificial Sequence
  Synthetic
cacaaagccgug

SEQ ID NO: 2903 - RNA, 12 nt, Artificial Sequence
  Synthetic
acaaagccgugc

SEQ ID NO: 2904 - RNA, 12 nt, Artificial Sequence
  Synthetic
caaagccgugcc

SEQ ID NO: 2905 - RNA, 12 nt, Artificial Sequence
  Synthetic
aaagccgugccu

SEQ ID NO: 2906 - RNA, 12 nt, Artificial Sequence
  Synthetic
aagccgugccuu

SEQ ID NO: 2907 - RNA, 12 nt, Artificial Sequence
  Synthetic
agccgugccuuu

SEQ ID NO: 2908 - RNA, 12 nt, Artificial Sequence
  Synthetic
gccgugccuuuc

SEQ ID NO: 2909 - RNA, 12 nt, Artificial Sequence
  Synthetic
ccgugccuuucu

SEQ ID NO: 2910 - RNA, 12 nt, Artificial Sequence
  Synthetic
cgugccuuucuc

SEQ ID NO: 2911 - RNA, 12 nt, Artificial Sequence
  Synthetic
gugccuuucucu

SEQ ID NO: 2912 - RNA, 12 nt, Artificial Sequence
  Synthetic
ugccuuucucug

SEQ ID NO: 2913 - RNA, 12 nt, Artificial Sequence
  Synthetic
gccuuucucugg

SEQ ID NO: 2914 - RNA, 12 nt, Artificial Sequence
  Synthetic
ccuuucucuggc

SEQ ID NO: 2915 - RNA, 12 nt, Artificial Sequence
  Synthetic
cuuucucuggcu

SEQ ID NO: 2916 - RNA, 12 nt, Artificial Sequence
  Synthetic
uuucucuggcuc

SEQ ID NO: 2917 - RNA, 12 nt, Artificial Sequence
  Synthetic
uucucuggcucc

SEQ ID NO: 2918 - RNA, 12 nt, Artificial Sequence
  Synthetic
ucucuggcucca

SEQ ID NO: 2919 - RNA, 12 nt, Artificial Sequence
  Synthetic
cucuggcuccag

SEQ ID NO: 2920 - RNA, 12 nt, Artificial Sequence
  Synthetic
ucuggcuccaga

SEQ ID NO: 2921 - RNA, 12 nt, Artificial Sequence
  Synthetic
cuggcuccagaa

SEQ ID NO: 2922 - RNA, 12 nt, Artificial Sequence
  Synthetic
uggcuccagaau

SEQ ID NO: 2923 - RNA, 12 nt, Artificial Sequence
  Synthetic
ggcuccagaaua

SEQ ID NO: 2924 - RNA, 12 nt, Artificial Sequence
  Synthetic
gcuccagaauau

SEQ ID NO: 2925 - RNA, 12 nt, Artificial Sequence
  Synthetic
cuccagaauaug

SEQ ID NO: 2926 - RNA, 12 nt, Artificial Sequence
  Synthetic
uccagaauaugc

SEQ ID NO: 2927 - RNA, 12 nt, Artificial Sequence
  Synthetic
ccagaauaugca

SEQ ID NO: 2928 - RNA, 12 nt, Artificial Sequence
  Synthetic
cagaauaugcau

SEQ ID NO: 2929 - RNA, 12 nt, Artificial Sequence
  Synthetic
agaauaugcaua

SEQ ID NO: 2930 - RNA, 12 nt, Artificial Sequence
  Synthetic
gaauaugcauaa

SEQ ID NO: 2931 - RNA, 12 nt, Artificial Sequence
  Synthetic
aauaugcauaau

SEQ ID NO: 2932 - RNA, 12 nt, Artificial Sequence
  Synthetic
auaugcauaauc

SEQ ID NO: 2933 - RNA, 12 nt, Artificial Sequence
  Synthetic
uaugcauaauca

SEQ ID NO: 2934 - RNA, 12 nt, Artificial Sequence
  Synthetic
augcauaaucag

SEQ ID NO: 2935 - RNA, 12 nt, Artificial Sequence
  Synthetic
ugcauaaucagc

SEQ ID NO: 2936 - RNA, 12 nt, Artificial Sequence
  Synthetic
gcauaaucagcg

SEQ ID NO: 2937 - RNA, 12 nt, Artificial Sequence
  Synthetic
cauaaucagcgc

SEQ ID NO: 2938 - RNA, 12 nt, Artificial Sequence
  Synthetic
auaaucagcgcc

SEQ ID NO: 2939 - RNA, 12 nt, Artificial Sequence
  Synthetic
uaaucagcgccc

SEQ ID NO: 2940 - RNA, 12 nt, Artificial Sequence
  Synthetic
aaucagcgcccu

SEQ ID NO: 2941 - RNA, 12 nt, Artificial Sequence
  Synthetic
aucagcgcccug

SEQ ID NO: 2942 - RNA, 12 nt, Artificial Sequence
  Synthetic
ucagcgcccugg

SEQ ID NO: 2943 - RNA, 12 nt, Artificial Sequence
  Synthetic
cagcgcccugga

SEQ ID NO: 2944 - RNA, 12 nt, Artificial Sequence
  Synthetic
agcgcccuggag

SEQ ID NO: 2945 - RNA, 12 nt, Artificial Sequence
  Synthetic
gcgcccuggagu

SEQ ID NO: 2946 - RNA, 12 nt, Artificial Sequence
  Synthetic
cgcccuggaguc

SEQ ID NO: 2947 - RNA, 12 nt, Artificial Sequence
  Synthetic
gcccuggagucc

SEQ ID NO: 2948 - RNA, 12 nt, Artificial Sequence
  Synthetic
cccuggaguccc

SEQ ID NO: 2949 - RNA, 12 nt, Artificial Sequence
  Synthetic
ccuggagucccc

SEQ ID NO: 2950 - RNA, 12 nt, Artificial Sequence
  Synthetic
cuggaguccccu

SEQ ID NO: 2951 - RNA, 12 nt, Artificial Sequence
  Synthetic
uggaguccccug

SEQ ID NO: 2952 - RNA, 12 nt, Artificial Sequence
  Synthetic
ggaguccccugg

SEQ ID NO: 2953 - RNA, 12 nt, Artificial Sequence
  Synthetic
gaguccccuggg

SEQ ID NO: 2954 - RNA, 12 nt, Artificial Sequence
  Synthetic
aguccccugggc

SEQ ID NO: 2955 - RNA, 12 nt, Artificial Sequence
  Synthetic
guccccugggcc

SEQ ID NO: 2956 - RNA, 12 nt, Artificial Sequence
  Synthetic
uccccugggccu

SEQ ID NO: 2957 - RNA, 12 nt, Artificial Sequence
  Synthetic
ccccugggccug

SEQ ID NO: 2958 - RNA, 12 nt, Artificial Sequence
  Synthetic
cccugggccugg

SEQ ID NO: 2959 - RNA, 12 nt, Artificial Sequence
  Synthetic
ccugggccugga

SEQ ID NO: 2960 - RNA, 12 nt, Artificial Sequence
  Synthetic
cugggccuggac

SEQ ID NO: 2961 - RNA, 12 nt, Artificial Sequence
  Synthetic
ugggccuggacc

SEQ ID NO: 2962 - RNA, 12 nt, Artificial Sequence
  Synthetic
gggccuggaccg

SEQ ID NO: 2963 - RNA, 12 nt, Artificial Sequence
  Synthetic
ggccuggaccgc

SEQ ID NO: 2964 - RNA, 12 nt, Artificial Sequence
  Synthetic
gccuggaccgcu

SEQ ID NO: 2965 - RNA, 12 nt, Artificial Sequence
  Synthetic
ccuggaccgcuu

SEQ ID NO: 2966 - RNA, 12 nt, Artificial Sequence
  Synthetic
cuggaccgcuuc

SEQ ID NO: 2967 - RNA, 12 nt, Artificial Sequence
  Synthetic
uggaccgcuucc

SEQ ID NO: 2968 - RNA, 12 nt, Artificial Sequence
  Synthetic
ggaccgcuuccc

SEQ ID NO: 2969 - RNA, 12 nt, Artificial Sequence
  Synthetic
gaccgcuuccca

SEQ ID NO: 2970 - RNA, 12 nt, Artificial Sequence
  Synthetic
accgcuucccag

SEQ ID NO: 2971 - RNA, 12 nt, Artificial Sequence
  Synthetic
ccgcuucccaga

SEQ ID NO: 2972 - RNA, 12 nt, Artificial Sequence
  Synthetic
cgcuucccagag

SEQ ID NO: 2973 - RNA, 12 nt, Artificial Sequence
  Synthetic
gcuucccagagg

SEQ ID NO: 2974 - RNA, 12 nt, Artificial Sequence
  Synthetic
cuucccagaggc

SEQ ID NO: 2975 - RNA, 12 nt, Artificial Sequence
  Synthetic
uucccagaggcc

SEQ ID NO: 2976 - RNA, 12 nt, Artificial Sequence
  Synthetic
ucccagaggcca

SEQ ID NO: 2977 - RNA, 12 nt, Artificial Sequence
  Synthetic
cccagaggccag

SEQ ID NO: 2978 - RNA, 12 nt, Artificial Sequence
  Synthetic
ccagaggccagg

SEQ ID NO: 2979 - RNA, 12 nt, Artificial Sequence
  Synthetic
cagaggccagga

SEQ ID NO: 2980 - RNA, 12 nt, Artificial Sequence
  Synthetic
agaggccaggaa

SEQ ID NO: 2981 - RNA, 12 nt, Artificial Sequence
  Synthetic
gaggccaggaau

SEQ ID NO: 2982 - RNA, 12 nt, Artificial Sequence
  Synthetic
aggccaggaauc

SEQ ID NO: 2983 - RNA, 12 nt, Artificial Sequence
  Synthetic
ggccaggaaucu

SEQ ID NO: 2984 - RNA, 12 nt, Artificial Sequence
  Synthetic
gccaggaaucug

SEQ ID NO: 2985 - RNA, 12 nt, Artificial Sequence
  Synthetic
ccaggaaucugc

SEQ ID NO: 2986 - RNA, 12 nt, Artificial Sequence
  Synthetic
caggaaucugcc

SEQ ID NO: 2987 - RNA, 12 nt, Artificial Sequence
  Synthetic
aggaaucugcca

SEQ ID NO: 2988 - RNA, 12 nt, Artificial Sequence
  Synthetic
ggaaucugccau

SEQ ID NO: 2989 - RNA, 12 nt, Artificial Sequence
  Synthetic
gaaucugccauu

SEQ ID NO: 2990 - RNA, 12 nt, Artificial Sequence
  Synthetic
aaucugccauua

SEQ ID NO: 2991 - RNA, 12 nt, Artificial Sequence
  Synthetic
aucugccauuac

SEQ ID NO: 2992 - RNA, 12 nt, Artificial Sequence
  Synthetic
ucugccauuacu

SEQ ID NO: 2993 - RNA, 12 nt, Artificial Sequence
  Synthetic
cugccauuacuc

SEQ ID NO: 2994 - RNA, 12 nt, Artificial Sequence
  Synthetic
ugccauuacucu

SEQ ID NO: 2995 - RNA, 12 nt, Artificial Sequence
  Synthetic
gccauuacucug

SEQ ID NO: 2996 - RNA, 12 nt, Artificial Sequence
  Synthetic
ccauuacucugc

SEQ ID NO: 2997 - RNA, 12 nt, Artificial Sequence
  Synthetic
cauuacucugcg

SEQ ID NO: 2998 - RNA, 12 nt, Artificial Sequence
  Synthetic
auuacucugcgg

SEQ ID NO: 2999 - RNA, 12 nt, Artificial Sequence
  Synthetic
uuacucugcggu

SEQ ID NO: 3000 - RNA, 12 nt, Artificial Sequence
  Synthetic
uacucugcggug

SEQ ID NO: 3001 - RNA, 12 nt, Artificial Sequence
  Synthetic
acucugcggugg

SEQ ID NO: 3002 - RNA, 12 nt, Artificial Sequence
  Synthetic
cucugcgguggu

SEQ ID NO: 3003 - RNA, 12 nt, Artificial Sequence
  Synthetic
ucugcgguggug

SEQ ID NO: 3004 - RNA, 12 nt, Artificial Sequence
  Synthetic
cugcgguggugc

SEQ ID NO: 3005 - RNA, 12 nt, Artificial Sequence
  Synthetic
ugcgguggugcc

SEQ ID NO: 3006 - RNA, 12 nt, Artificial Sequence
  Synthetic
gcgguggugcca

SEQ ID NO: 3007 - RNA, 12 nt, Artificial Sequence
  Synthetic
cgguggugccag

SEQ ID NO: 3008 - RNA, 12 nt, Artificial Sequence
  Synthetic
gguggugccaga

SEQ ID NO: 3009 - RNA, 12 nt, Artificial Sequence
  Synthetic
guggugccagag

SEQ ID NO: 3010 - RNA, 12 nt, Artificial Sequence
  Synthetic
uggugccagagg

SEQ ID NO: 3011 - RNA, 12 nt, Artificial Sequence
  Synthetic
ggugccagaggu

SEQ ID NO: 3012 - RNA, 12 nt, Artificial Sequence
  Synthetic
gugccagagguu

SEQ ID NO: 3013 - RNA, 12 nt, Artificial Sequence
  Synthetic
ugccagagguuu

SEQ ID NO: 3014 - RNA, 12 nt, Artificial Sequence
  Synthetic
gccagagguuuu

SEQ ID NO: 3015 - RNA, 12 nt, Artificial Sequence
  Synthetic
ccagagguuuua

SEQ ID NO: 3016 - RNA, 12 nt, Artificial Sequence
  Synthetic
cagagguuuuag

SEQ ID NO: 3017 - RNA, 12 nt, Artificial Sequence
  Synthetic
agagguuuuagg

SEQ ID NO: 3018 - RNA, 12 nt, Artificial Sequence
  Synthetic
gagguuuuagga

SEQ ID NO: 3019 - RNA, 12 nt, Artificial Sequence
  Synthetic
agguuuuaggaa

SEQ ID NO: 3020 - RNA, 12 nt, Artificial Sequence
  Synthetic
gguuuuaggaaa

SEQ ID NO: 3021 - RNA, 12 nt, Artificial Sequence
  Synthetic
guuuuaggaaac

SEQ ID NO: 3022 - RNA, 12 nt, Artificial Sequence
  Synthetic
uuuuaggaaacc

SEQ ID NO: 3023 - RNA, 12 nt, Artificial Sequence
  Synthetic
uuuaggaaaccu

SEQ ID NO: 3024 - RNA, 12 nt, Artificial Sequence
  Synthetic
uuaggaaaccug

SEQ ID NO: 3025 - RNA, 12 nt, Artificial Sequence
  Synthetic
uaggaaaccugg

SEQ ID NO: 3026 - RNA, 12 nt, Artificial Sequence
  Synthetic
aggaaaccuggc

SEQ ID NO: 3027 - RNA, 12 nt, Artificial Sequence
  Synthetic
ggaaaccuggca

SEQ ID NO: 3028 - RNA, 12 nt, Artificial Sequence
  Synthetic
gaaaccuggcau

SEQ ID NO: 3029 - RNA, 12 nt, Artificial Sequence
  Synthetic
aaaccuggcaug

SEQ ID NO: 3030 - RNA, 12 nt, Artificial Sequence
  Synthetic
aaccuggcaugg

SEQ ID NO: 3031 - RNA, 12 nt, Artificial Sequence
  Synthetic
accuggcauggu

SEQ ID NO: 3032 - RNA, 12 nt, Artificial Sequence
  Synthetic
ccuggcauggug

SEQ ID NO: 3033 - RNA, 12 nt, Artificial Sequence
  Synthetic
cuggcauggugc

SEQ ID NO: 3034 - RNA, 12 nt, Artificial Sequence
  Synthetic
uggcauggugcu

SEQ ID NO: 3035 - RNA, 12 nt, Artificial Sequence
  Synthetic
ggcauggugcuu

SEQ ID NO: 3036 - RNA, 12 nt, Artificial Sequence
  Synthetic
gcauggugcuuu

SEQ ID NO: 3037 - RNA, 12 nt, Artificial Sequence
  Synthetic
cauggugcuuuc

SEQ ID NO: 3038 - RNA, 12 nt, Artificial Sequence
  Synthetic
auggugcuuuca

SEQ ID NO: 3039 - RNA, 12 nt, Artificial Sequence
  Synthetic
uggugcuuucag

SEQ ID NO: 3040 - RNA, 12 nt, Artificial Sequence
  Synthetic
ggugcuuucagg

SEQ ID NO: 3041 - RNA, 12 nt, Artificial Sequence
  Synthetic
gugcuuucaggu

SEQ ID NO: 3042 - RNA, 12 nt, Artificial Sequence
  Synthetic
ugcuuucagguc

SEQ ID NO: 3043 - RNA, 12 nt, Artificial Sequence
  Synthetic
gcuuucaggucu

SEQ ID NO: 3044 - RNA, 12 nt, Artificial Sequence
  Synthetic
cuuucaggucug

SEQ ID NO: 3045 - RNA, 12 nt, Artificial Sequence
  Synthetic
uuucaggucugg

SEQ ID NO: 3046 - RNA, 12 nt, Artificial Sequence
  Synthetic
uucaggucuggg

SEQ ID NO: 3047 - RNA, 12 nt, Artificial Sequence
  Synthetic
ucaggucugggg

SEQ ID NO: 3048 - RNA, 12 nt, Artificial Sequence
  Synthetic
caggucuggggc

SEQ ID NO: 3049 - RNA, 12 nt, Artificial Sequence
  Synthetic
aggucuggggcu

SEQ ID NO: 3050 - RNA, 12 nt, Artificial Sequence
  Synthetic
ggucuggggcuu

SEQ ID NO: 3051 - RNA, 12 nt, Artificial Sequence
  Synthetic
gucuggggcuuu

SEQ ID NO: 3052 - RNA, 12 nt, Artificial Sequence
  Synthetic
ucuggggcuuuu

SEQ ID NO: 3053 - RNA, 12 nt, Artificial Sequence
  Synthetic
cuggggcuuuua

SEQ ID NO: 3054 - RNA, 12 nt, Artificial Sequence
  Synthetic
uggggcuuuuag

SEQ ID NO: 3055 - RNA, 12 nt, Artificial Sequence
  Synthetic
ggggcuuuuaga

SEQ ID NO: 3056 - RNA, 12 nt, Artificial Sequence
  Synthetic
gggcuuuuagag

SEQ ID NO: 3057 - RNA, 12 nt, Artificial Sequence
  Synthetic
ggcuuuuagagc

SEQ ID NO: 3058 - RNA, 12 nt, Artificial Sequence
  Synthetic
gcuuuuagagcc

SEQ ID NO: 3059 - RNA, 12 nt, Artificial Sequence
  Synthetic
cuuuuagagccc

SEQ ID NO: 3060 - RNA, 12 nt, Artificial Sequence
  Synthetic
uuuuagagcccc

SEQ ID NO: 3061 - RNA, 12 nt, Artificial Sequence
  Synthetic
uuuagagccccc

SEQ ID NO: 3062 - RNA, 12 nt, Artificial Sequence
  Synthetic
uuagagcccccc

SEQ ID NO: 3063 - RNA, 12 nt, Artificial Sequence
  Synthetic
uagagccccccg

SEQ ID NO: 3064 - RNA, 12 nt, Artificial Sequence
  Synthetic
agagccccccgu

SEQ ID NO: 3065 - RNA, 12 nt, Artificial Sequence
  Synthetic
gagccccccgug

SEQ ID NO: 3066 - RNA, 12 nt, Artificial Sequence
  Synthetic
agccccccgugu

SEQ ID NO: 3067 - RNA, 12 nt, Artificial Sequence
  Synthetic
gccccccgugug

SEQ ID NO: 3068 - RNA, 12 nt, Artificial Sequence
  Synthetic
ccccccgugugg

SEQ ID NO: 3069 - RNA, 12 nt, Artificial Sequence
  Synthetic
cccccguguggc

SEQ ID NO: 3070 - RNA, 12 nt, Artificial Sequence
  Synthetic
ccccguguggcu

SEQ ID NO: 3071 - RNA, 12 nt, Artificial Sequence
  Synthetic
cccguguggcuu

SEQ ID NO: 3072 - RNA, 12 nt, Artificial Sequence
  Synthetic
ccguguggcuua

SEQ ID NO: 3073 - RNA, 12 nt, Artificial Sequence
  Synthetic
cguguggcuuac

SEQ ID NO: 3074 - RNA, 12 nt, Artificial Sequence
  Synthetic
guguggcuuaca

SEQ ID NO: 3075 - RNA, 12 nt, Artificial Sequence
  Synthetic
uguggcuuacaa

SEQ ID NO: 3076 - RNA, 12 nt, Artificial Sequence
  Synthetic
guggcuuacaaa

SEQ ID NO: 3077 - RNA, 12 nt, Artificial Sequence
  Synthetic
uggcuuacaaau

SEQ ID NO: 3078 - RNA, 12 nt, Artificial Sequence
  Synthetic
ggcuuacaaauu

SEQ ID NO: 3079 - RNA, 12 nt, Artificial Sequence
  Synthetic
gcuuacaaauuc

SEQ ID NO: 3080 - RNA, 12 nt, Artificial Sequence
  Synthetic
cuuacaaauucu

SEQ ID NO: 3081 - RNA, 12 nt, Artificial Sequence
  Synthetic
uuacaaauucua

SEQ ID NO: 3082 - RNA, 12 nt, Artificial Sequence
  Synthetic
uacaaauucuac

SEQ ID NO: 3083 - RNA, 12 nt, Artificial Sequence
  Synthetic
acaaauucuaca

SEQ ID NO: 3084 - RNA, 12 nt, Artificial Sequence
  Synthetic
caaauucuacag

SEQ ID NO: 3085 - RNA, 12 nt, Artificial Sequence
  Synthetic
aaauucuacagc

SEQ ID NO: 3086 - RNA, 12 nt, Artificial Sequence
  Synthetic
aauucuacagca

SEQ ID NO: 3087 - RNA, 12 nt, Artificial Sequence
  Synthetic
auucuacagcau

SEQ ID NO: 3088 - RNA, 12 nt, Artificial Sequence
  Synthetic
uucuacagcaua

SEQ ID NO: 3089 - RNA, 12 nt, Artificial Sequence
  Synthetic
ucuacagcauac

SEQ ID NO: 3090 - RNA, 12 nt, Artificial Sequence
  Synthetic
cuacagcauaca

SEQ ID NO: 3091 - RNA, 12 nt, Artificial Sequence
  Synthetic
uacagcauacag

SEQ ID NO: 3092 - RNA, 12 nt, Artificial Sequence
  Synthetic
acagcauacaga

SEQ ID NO: 3093 - RNA, 12 nt, Artificial Sequence
  Synthetic
cagcauacagag

SEQ ID NO: 3094 - RNA, 12 nt, Artificial Sequence
  Synthetic
agcauacagagc

SEQ ID NO: 3095 - RNA, 12 nt, Artificial Sequence
  Synthetic
gcauacagagca

SEQ ID NO: 3096 - RNA, 12 nt, Artificial Sequence
  Synthetic
cauacagagcag

SEQ ID NO: 3097 - RNA, 12 nt, Artificial Sequence
  Synthetic
auacagagcagg

SEQ ID NO: 3098 - RNA, 12 nt, Artificial Sequence
  Synthetic
uacagagcaggc

SEQ ID NO: 3099 - RNA, 12 nt, Artificial Sequence
  Synthetic
acagagcaggcc

SEQ ID NO: 3100 - RNA, 12 nt, Artificial Sequence
  Synthetic
cagagcaggcca

SEQ ID NO: 3101 - RNA, 12 nt, Artificial Sequence
  Synthetic
agagcaggccac

SEQ ID NO: 3102 - RNA, 12 nt, Artificial Sequence
  Synthetic
gagcaggccacg

SEQ ID NO: 3103 - RNA, 12 nt, Artificial Sequence
  Synthetic
agcaggccacgc

SEQ ID NO: 3104 - RNA, 12 nt, Artificial Sequence
  Synthetic
gcaggccacgcu

SEQ ID NO: 3105 - RNA, 12 nt, Artificial Sequence
  Synthetic
caggccacgcuc

SEQ ID NO: 3106 - RNA, 12 nt, Artificial Sequence
  Synthetic
aggccacgcuca

SEQ ID NO: 3107 - RNA, 12 nt, Artificial Sequence
  Synthetic
ggccacgcucag

SEQ ID NO: 3108 - RNA, 12 nt, Artificial Sequence
  Synthetic
gccacgcucagg

SEQ ID NO: 3109 - RNA, 12 nt, Artificial Sequence
  Synthetic
ccacgcucaggc

SEQ ID NO: 3110 - RNA, 12 nt, Artificial Sequence
  Synthetic
cacgcucaggcc

SEQ ID NO: 3111 - RNA, 12 nt, Artificial Sequence
  Synthetic
acgcucaggccc

SEQ ID NO: 3112 - RNA, 12 nt, Artificial Sequence
  Synthetic
cgcucaggcccg

SEQ ID NO: 3113 - RNA, 12 nt, Artificial Sequence
  Synthetic
gcucaggcccgg

SEQ ID NO: 3114 - RNA, 12 nt, Artificial Sequence
  Synthetic
cucaggcccggc

SEQ ID NO: 3115 - RNA, 12 nt, Artificial Sequence
  Synthetic
ucaggcccggca

SEQ ID NO: 3116 - RNA, 12 nt, Artificial Sequence
  Synthetic
caggcccggcau

SEQ ID NO: 3117 - RNA, 12 nt, Artificial Sequence
  Synthetic
aggcccggcaug

SEQ ID NO: 3118 - RNA, 12 nt, Artificial Sequence
  Synthetic
ggcccggcaugc

SEQ ID NO: 3119 - RNA, 12 nt, Artificial Sequence
  Synthetic
gcccggcaugcg

SEQ ID NO: 3120 - RNA, 12 nt, Artificial Sequence
  Synthetic
cccggcaugcgg

SEQ ID NO: 3121 - RNA, 12 nt, Artificial Sequence
  Synthetic
ccggcaugcggg

SEQ ID NO: 3122 - RNA, 12 nt, Artificial Sequence
  Synthetic
cggcaugcgggc

SEQ ID NO: 3123 - RNA, 12 nt, Artificial Sequence
  Synthetic
ggcaugcgggcc

SEQ ID NO: 3124 - RNA, 12 nt, Artificial Sequence
  Synthetic
gcaugcgggcca

SEQ ID NO: 3125 - RNA, 12 nt, Artificial Sequence
  Synthetic
caugcgggccac

SEQ ID NO: 3126 - RNA, 12 nt, Artificial Sequence
  Synthetic
augcgggccacc

SEQ ID NO: 3127 - RNA, 12 nt, Artificial Sequence
  Synthetic
ugcgggccacca

SEQ ID NO: 3128 - RNA, 12 nt, Artificial Sequence
  Synthetic
gcgggccaccaa

SEQ ID NO: 3129 - RNA, 12 nt, Artificial Sequence
  Synthetic
cgggccaccaag

SEQ ID NO: 3130 - RNA, 12 nt, Artificial Sequence
  Synthetic
gggccaccaagu

SEQ ID NO: 3131 - RNA, 12 nt, Artificial Sequence
  Synthetic
ggccaccaaguu

SEQ ID NO: 3132 - RNA, 12 nt, Artificial Sequence
  Synthetic
gccaccaaguuc

SEQ ID NO: 3133 - RNA, 12 nt, Artificial Sequence
  Synthetic
ccaccaaguucu

SEQ ID NO: 3134 - RNA, 12 nt, Artificial Sequence
  Synthetic
caccaaguucug

SEQ ID NO: 3135 - RNA, 12 nt, Artificial Sequence
  Synthetic
accaaguucugg

SEQ ID NO: 3136 - RNA, 12 nt, Artificial Sequence
  Synthetic
ccaaguucugga

SEQ ID NO: 3137 - RNA, 12 nt, Artificial Sequence
  Synthetic
caaguucuggaa

SEQ ID NO: 3138 - RNA, 12 nt, Artificial Sequence
  Synthetic
aaguucuggaaa

SEQ ID NO: 3139 - RNA, 12 nt, Artificial Sequence
  Synthetic
aguucuggaaac

SEQ ID NO: 3140 - RNA, 12 nt, Artificial Sequence
  Synthetic
guucuggaaacc

SEQ ID NO: 3141 - RNA, 12 nt, Artificial Sequence
  Synthetic
uucuggaaacca

SEQ ID NO: 3142 - RNA, 12 nt, Artificial Sequence
  Synthetic
ucuggaaaccac

SEQ ID NO: 3143 - RNA, 12 nt, Artificial Sequence
  Synthetic
cuggaaaccacg

SEQ ID NO: 3144 - RNA, 12 nt, Artificial Sequence
  Synthetic
uggaaaccacgu

SEQ ID NO: 3145 - RNA, 12 nt, Artificial Sequence
  Synthetic
ggaaaccacgug

SEQ ID NO: 3146 - RNA, 12 nt, Artificial Sequence
  Synthetic
gaaaccacgugg

SEQ ID NO: 3147 - RNA, 12 nt, Artificial Sequence
  Synthetic
aaaccacguggu

SEQ ID NO: 3148 - RNA, 12 nt, Artificial Sequence
  Synthetic
aaccacguggug

SEQ ID NO: 3149 - RNA, 12 nt, Artificial Sequence
  Synthetic
accacguggugu

SEQ ID NO: 3150 - RNA, 12 nt, Artificial Sequence
  Synthetic
ccacgugguguc

SEQ ID NO: 3151 - RNA, 12 nt, Artificial Sequence
  Synthetic
cacguggugucc

SEQ ID NO: 3152 - RNA, 12 nt, Artificial Sequence
  Synthetic
acgugguguccc

SEQ ID NO: 3153 - RNA, 12 nt, Artificial Sequence
  Synthetic
cguggugucccu

SEQ ID NO: 3154 - RNA, 12 nt, Artificial Sequence
  Synthetic
guggugucccug

SEQ ID NO: 3155 - RNA, 12 nt, Artificial Sequence
  Synthetic
uggugucccugc

SEQ ID NO: 3156 - RNA, 12 nt, Artificial Sequence
  Synthetic
ggugucccugcg

SEQ ID NO: 3157 - RNA, 12 nt, Artificial Sequence
  Synthetic
gugucccugcga

SEQ ID NO: 3158 - RNA, 12 nt, Artificial Sequence
  Synthetic
ugucccugcgaa

SEQ ID NO: 3159 - RNA, 12 nt, Artificial Sequence
  Synthetic
gucccugcgaau

SEQ ID NO: 3160 - RNA, 12 nt, Artificial Sequence
  Synthetic
ucccugcgaaug

SEQ ID NO: 3161 - RNA, 12 nt, Artificial Sequence
  Synthetic
cccugcgaaugg

SEQ ID NO: 3162 - RNA, 12 nt, Artificial Sequence
  Synthetic
ccugcgaauggg

SEQ ID NO: 3163 - RNA, 12 nt, Artificial Sequence
  Synthetic
cugcgaaugggg

SEQ ID NO: 3164 - RNA, 12 nt, Artificial Sequence
  Synthetic
ugcgaauggggc

SEQ ID NO: 3165 - RNA, 12 nt, Artificial Sequence
  Synthetic
gcgaauggggcg

SEQ ID NO: 3166 - RNA, 12 nt, Artificial Sequence
  Synthetic
gaauggggcgau

SEQ ID NO: 3167 - RNA, 12 nt, Artificial Sequence
  Synthetic
aauggggcgauc

SEQ ID NO: 3168 - RNA, 12 nt, Artificial Sequence
  Synthetic
auggggcgauca

SEQ ID NO: 3169 - RNA, 12 nt, Artificial Sequence
  Synthetic
uggggcgaucaa

SEQ ID NO: 3170 - RNA, 12 nt, Artificial Sequence
  Synthetic
ggggcgaucaag

SEQ ID NO: 3171 - RNA, 12 nt, Artificial Sequence
  Synthetic
gggcgaucaagu

SEQ ID NO: 3172 - RNA, 12 nt, Artificial Sequence
  Synthetic
ggcgaucaaguc

SEQ ID NO: 3173 - RNA, 12 nt, Artificial Sequence
  Synthetic
gcgaucaagucc

SEQ ID NO: 3174 - RNA, 12 nt, Artificial Sequence
  Synthetic
cgaucaagucca

SEQ ID NO: 3175 - RNA, 12 nt, Artificial Sequence
  Synthetic
gaucaaguccag

SEQ ID NO: 3176 - RNA, 12 nt, Artificial Sequence
  Synthetic
aucaaguccaga

SEQ ID NO: 3177 - RNA, 12 nt, Artificial Sequence
  Synthetic
ucaaguccagag

SEQ ID NO: 3178 - RNA, 12 nt, Artificial Sequence
  Synthetic
caaguccagagc

SEQ ID NO: 3179 - RNA, 12 nt, Artificial Sequence
  Synthetic
aaguccagagcc

SEQ ID NO: 3180 - RNA, 12 nt, Artificial Sequence
  Synthetic
aguccagagccg

SEQ ID NO: 3181 - RNA, 12 nt, Artificial Sequence
  Synthetic
guccagagccgg

SEQ ID NO: 3182 - RNA, 12 nt, Artificial Sequence
  Synthetic
uccagagccggg

SEQ ID NO: 3183 - RNA, 12 nt, Artificial Sequence
  Synthetic
ccagagccgggg

SEQ ID NO: 3184 - RNA, 12 nt, Artificial Sequence
  Synthetic
cagagccggggc

SEQ ID NO: 3185 - RNA, 12 nt, Artificial Sequence
  Synthetic
agagccggggca

SEQ ID NO: 3186 - RNA, 12 nt, Artificial Sequence
  Synthetic
gagccggggcac

SEQ ID NO: 3187 - RNA, 12 nt, Artificial Sequence
  Synthetic
agccggggcacu

SEQ ID NO: 3188 - RNA, 12 nt, Artificial Sequence
  Synthetic
gccggggcacuu

SEQ ID NO: 3189 - RNA, 12 nt, Artificial Sequence
  Synthetic
ccggggcacuuu

SEQ ID NO: 3190 - RNA, 12 nt, Artificial Sequence
  Synthetic
cggggcacuuuc

SEQ ID NO: 3191 - RNA, 12 nt, Artificial Sequence
  Synthetic
ggggcacuuuca

SEQ ID NO: 3192 - RNA, 12 nt, Artificial Sequence
  Synthetic
gggcacuuucag

SEQ ID NO: 3193 - RNA, 12 nt, Artificial Sequence
  Synthetic
ggcacuuucaga

SEQ ID NO: 3194 - RNA, 12 nt, Artificial Sequence
  Synthetic
gcacuuucagag

SEQ ID NO: 3195 - RNA, 12 nt, Artificial Sequence
  Synthetic
cacuuucagagu

SEQ ID NO: 3196 - RNA, 12 nt, Artificial Sequence
  Synthetic
acuuucagaguu

SEQ ID NO: 3197 - RNA, 12 nt, Artificial Sequence
  Synthetic
cuuucagaguuu

SEQ ID NO: 3198 - RNA, 12 nt, Artificial Sequence
  Synthetic
uuucagaguuug

SEQ ID NO: 3199 - RNA, 12 nt, Artificial Sequence
  Synthetic
uucagaguuuga

SEQ ID NO: 3200 - RNA, 12 nt, Artificial Sequence
  Synthetic
ucagaguuugaa

SEQ ID NO: 3201 - RNA, 12 nt, Artificial Sequence
  Synthetic
cagaguuugaag

SEQ ID NO: 3202 - RNA, 12 nt, Artificial Sequence
  Synthetic
agaguuugaagg

SEQ ID NO: 3203 - RNA, 12 nt, Artificial Sequence
  Synthetic
gaguuugaaggu

SEQ ID NO: 3204 - RNA, 12 nt, Artificial Sequence
  Synthetic
aguuugaaggua

SEQ ID NO: 3205 - RNA, 12 nt, Artificial Sequence
  Synthetic
guuugaagguaa

SEQ ID NO: 3206 - RNA, 12 nt, Artificial Sequence
  Synthetic
uuugaagguaac

SEQ ID NO: 3207 - RNA, 12 nt, Artificial Sequence
  Synthetic
uugaagguaacu

SEQ ID NO: 3208 - RNA, 12 nt, Artificial Sequence
  Synthetic
ugaagguaacug

SEQ ID NO: 3209 - RNA, 12 nt, Artificial Sequence
  Synthetic
gaagguaacuga

SEQ ID NO: 3210 - RNA, 12 nt, Artificial Sequence
  Synthetic
aagguaacugag

SEQ ID NO: 3211 - RNA, 12 nt, Artificial Sequence
  Synthetic
agguaacugaga

SEQ ID NO: 3212 - RNA, 12 nt, Artificial Sequence
  Synthetic
gguaacugagag

SEQ ID NO: 3213 - RNA, 12 nt, Artificial Sequence
  Synthetic
guaacugagagc

SEQ ID NO: 3214 - RNA, 12 nt, Artificial Sequence
  Synthetic
uaacugagagca

SEQ ID NO: 3215 - RNA, 12 nt, Artificial Sequence
  Synthetic
aacugagagcag

SEQ ID NO: 3216 - RNA, 12 nt, Artificial Sequence
  Synthetic
acugagagcaga

SEQ ID NO: 3217 - RNA, 12 nt, Artificial Sequence
  Synthetic
cugagagcagau

SEQ ID NO: 3218 - RNA, 12 nt, Artificial Sequence
  Synthetic
ugagagcagaug

SEQ ID NO: 3219 - RNA, 12 nt, Artificial Sequence
  Synthetic
gagagcagaugg

SEQ ID NO: 3220 - RNA, 12 nt, Artificial Sequence
  Synthetic
agagcagauggu

SEQ ID NO: 3221 - RNA, 12 nt, Artificial Sequence
  Synthetic
gagcagaugguc

SEQ ID NO: 3222 - RNA, 12 nt, Artificial Sequence
  Synthetic
agcagauggucc

SEQ ID NO: 3223 - RNA, 12 nt, Artificial Sequence
  Synthetic
gcagaugguccu

SEQ ID NO: 3224 - RNA, 12 nt, Artificial Sequence
  Synthetic
cagaugguccuc

SEQ ID NO: 3225 - RNA, 12 nt, Artificial Sequence
  Synthetic
agaugguccucc

SEQ ID NO: 3226 - RNA, 12 nt, Artificial Sequence
  Synthetic
gaugguccucca

SEQ ID NO: 3227 - RNA, 12 nt, Artificial Sequence
  Synthetic
augguccuccau

SEQ ID NO: 3228 - RNA, 12 nt, Artificial Sequence
  Synthetic
ugguccuccauu

SEQ ID NO: 3229 - RNA, 12 nt, Artificial Sequence
  Synthetic
gguccuccauuu

SEQ ID NO: 3230 - RNA, 12 nt, Artificial Sequence
  Synthetic
guccuccauuuc

SEQ ID NO: 3231 - RNA, 12 nt, Artificial Sequence
  Synthetic
uccuccauuuca

SEQ ID NO: 3232 - RNA, 12 nt, Artificial Sequence
  Synthetic
ccuccauuucaa

SEQ ID NO: 3233 - RNA, 12 nt, Artificial Sequence
  Synthetic
cuccauuucaac

SEQ ID NO: 3234 - RNA, 12 nt, Artificial Sequence
  Synthetic
uccauuucaacu

SEQ ID NO: 3235 - RNA, 12 nt, Artificial Sequence
  Synthetic
ccauuucaacuc

SEQ ID NO: 3236 - RNA, 12 nt, Artificial Sequence
  Synthetic
cauuucaacucc

SEQ ID NO: 3237 - RNA, 12 nt, Artificial Sequence
  Synthetic
auuucaacucca

SEQ ID NO: 3238 - RNA, 12 nt, Artificial Sequence
  Synthetic
uuucaacuccag

SEQ ID NO: 3239 - RNA, 12 nt, Artificial Sequence
  Synthetic
uucaacuccaga

SEQ ID NO: 3240 - RNA, 12 nt, Artificial Sequence
  Synthetic
ucaacuccagaa

SEQ ID NO: 3241 - RNA, 12 nt, Artificial Sequence
  Synthetic
caacuccagaag

SEQ ID NO: 3242 - RNA, 12 nt, Artificial Sequence
  Synthetic
aacuccagaagu

SEQ ID NO: 3243 - RNA, 12 nt, Artificial Sequence
  Synthetic
acuccagaagug

SEQ ID NO: 3244 - RNA, 12 nt, Artificial Sequence
  Synthetic
cuccagaagugg

SEQ ID NO: 3245 - RNA, 12 nt, Artificial Sequence
  Synthetic
uccagaaguggg

SEQ ID NO: 3246 - RNA, 12 nt, Artificial Sequence
  Synthetic
ccagaagugggg

SEQ ID NO: 3247 - RNA, 12 nt, Artificial Sequence
  Synthetic
cagaaguggggc

SEQ ID NO: 3248 - RNA, 12 nt, Artificial Sequence
  Synthetic
agaaguggggcu

SEQ ID NO: 3249 - RNA, 12 nt, Artificial Sequence
  Synthetic
gaaguggggcuc

SEQ ID NO: 3250 - RNA, 12 nt, Artificial Sequence
  Synthetic
aaguggggcucu

SEQ ID NO: 3251 - RNA, 12 nt, Artificial Sequence
  Synthetic
aguggggcucug

SEQ ID NO: 3252 - RNA, 12 nt, Artificial Sequence
  Synthetic
guggggcucugg

SEQ ID NO: 3253 - RNA, 12 nt, Artificial Sequence
  Synthetic
uggggcucuggg

SEQ ID NO: 3254 - RNA, 12 nt, Artificial Sequence
  Synthetic
ggggcucuggga

SEQ ID NO: 3255 - RNA, 12 nt, Artificial Sequence
  Synthetic
gggcucugggag

SEQ ID NO: 3256 - RNA, 12 nt, Artificial Sequence
  Synthetic
ggcucugggagg

SEQ ID NO: 3257 - RNA, 12 nt, Artificial Sequence
  Synthetic
gcucugggaggg

SEQ ID NO: 3258 - RNA, 12 nt, Artificial Sequence
  Synthetic
cucugggaggga

SEQ ID NO: 3259 - RNA, 12 nt, Artificial Sequence
  Synthetic
ucugggagggau

SEQ ID NO: 3260 - RNA, 12 nt, Artificial Sequence
  Synthetic
cugggagggaug

SEQ ID NO: 3261 - RNA, 12 nt, Artificial Sequence
  Synthetic
ugggagggaugu

SEQ ID NO: 3262 - RNA, 12 nt, Artificial Sequence
  Synthetic
gggagggauguu

SEQ ID NO: 3263 - RNA, 12 nt, Artificial Sequence
  Synthetic
ggagggauguuc

SEQ ID NO: 3264 - RNA, 12 nt, Artificial Sequence
  Synthetic
gagggauguucu

SEQ ID NO: 3265 - RNA, 12 nt, Artificial Sequence
  Synthetic
agggauguucua

SEQ ID NO: 3266 - RNA, 12 nt, Artificial Sequence
  Synthetic
gggauguucuag

SEQ ID NO: 3267 - RNA, 12 nt, Artificial Sequence
  Synthetic
ggauguucuagc

SEQ ID NO: 3268 - RNA, 12 nt, Artificial Sequence
  Synthetic
gauguucuagcc

SEQ ID NO: 3269 - RNA, 12 nt, Artificial Sequence
  Synthetic
auguucuagccc

SEQ ID NO: 3270 - RNA, 12 nt, Artificial Sequence
  Synthetic
uguucuagcccu

SEQ ID NO: 3271 - RNA, 12 nt, Artificial Sequence
  Synthetic
guucuagcccuc

SEQ ID NO: 3272 - RNA, 12 nt, Artificial Sequence
  Synthetic
uucuagcccucc

SEQ ID NO: 3273 - RNA, 12 nt, Artificial Sequence
  Synthetic
ucuagcccuccc

SEQ ID NO: 3274 - RNA, 12 nt, Artificial Sequence
  Synthetic
cuagcccucccu

SEQ ID NO: 3275 - RNA, 12 nt, Artificial Sequence
  Synthetic
uagcccucccug

SEQ ID NO: 3276 - RNA, 12 nt, Artificial Sequence
  Synthetic
agcccucccugg

SEQ ID NO: 3277 - RNA, 12 nt, Artificial Sequence
  Synthetic
gcccucccuggc

SEQ ID NO: 3278 - RNA, 12 nt, Artificial Sequence
  Synthetic
cccucccuggca

SEQ ID NO: 3279 - RNA, 12 nt, Artificial Sequence
  Synthetic
ccucccuggcau

SEQ ID NO: 3280 - RNA, 12 nt, Artificial Sequence
  Synthetic
cucccuggcaug

SEQ ID NO: 3281 - RNA, 12 nt, Artificial Sequence
  Synthetic
ucccuggcaugu

SEQ ID NO: 3282 - RNA, 12 nt, Artificial Sequence
  Synthetic
cccuggcauguc

SEQ ID NO: 3283 - RNA, 12 nt, Artificial Sequence
  Synthetic
ccuggcauguca

SEQ ID NO: 3284 - RNA, 12 nt, Artificial Sequence
  Synthetic
cuggcaugucag

SEQ ID NO: 3285 - RNA, 12 nt, Artificial Sequence
  Synthetic
uggcaugucaga

SEQ ID NO: 3286 - RNA, 12 nt, Artificial Sequence
  Synthetic
ggcaugucagag

SEQ ID NO: 3287 - RNA, 12 nt, Artificial Sequence
  Synthetic
gcaugucagagc

SEQ ID NO: 3288 - RNA, 12 nt, Artificial Sequence
  Synthetic
caugucagagcc

SEQ ID NO: 3289 - RNA, 12 nt, Artificial Sequence
  Synthetic
augucagagcca

SEQ ID NO: 3290 - RNA, 12 nt, Artificial Sequence
  Synthetic
ugucagagccag

SEQ ID NO: 3291 - RNA, 12 nt, Artificial Sequence
  Synthetic
gucagagccagg

SEQ ID NO: 3292 - RNA, 12 nt, Artificial Sequence
  Synthetic
ucagagccaggc

SEQ ID NO: 3293 - RNA, 12 nt, Artificial Sequence
  Synthetic
cagagccaggcu

SEQ ID NO: 3294 - RNA, 12 nt, Artificial Sequence
  Synthetic
agagccaggcuc

SEQ ID NO: 3295 - RNA, 12 nt, Artificial Sequence
  Synthetic
gagccaggcucu

SEQ ID NO: 3296 - RNA, 12 nt, Artificial Sequence
  Synthetic
agccaggcucug

SEQ ID NO: 3297 - RNA, 12 nt, Artificial Sequence
  Synthetic
gccaggcucugc

SEQ ID NO: 3298 - RNA, 12 nt, Artificial Sequence
  Synthetic
ccaggcucugcc

SEQ ID NO: 3299 - RNA, 12 nt, Artificial Sequence
  Synthetic
caggcucugccu

SEQ ID NO: 3300 - RNA, 12 nt, Artificial Sequence
  Synthetic
aggcucugccug

SEQ ID NO: 3301 - RNA, 12 nt, Artificial Sequence
  Synthetic
ggcucugccugg

SEQ ID NO: 3302 - RNA, 12 nt, Artificial Sequence
  Synthetic
gcucugccugga

SEQ ID NO: 3303 - RNA, 12 nt, Artificial Sequence
  Synthetic
cucugccuggag

SEQ ID NO: 3304 - RNA, 12 nt, Artificial Sequence
  Synthetic
ucugccuggagg

SEQ ID NO: 3305 - RNA, 12 nt, Artificial Sequence
  Synthetic
cugccuggagga

SEQ ID NO: 3306 - RNA, 12 nt, Artificial Sequence
  Synthetic
ugccuggaggau

SEQ ID NO: 3307 - RNA, 12 nt, Artificial Sequence
  Synthetic
gccuggaggauc

SEQ ID NO: 3308 - RNA, 12 nt, Artificial Sequence
  Synthetic
ccuggaggaucc

SEQ ID NO: 3309 - RNA, 12 nt, Artificial Sequence
  Synthetic
cuggaggauccc

SEQ ID NO: 3310 - RNA, 12 nt, Artificial Sequence
  Synthetic
uggaggaucccu

SEQ ID NO: 3311 - RNA, 12 nt, Artificial Sequence
  Synthetic
ggaggaucccuc

SEQ ID NO: 3312 - RNA, 12 nt, Artificial Sequence
  Synthetic
gaggaucccucc

SEQ ID NO: 3313 - RNA, 12 nt, Artificial Sequence
  Synthetic
aggaucccucca

SEQ ID NO: 3314 - RNA, 12 nt, Artificial Sequence
  Synthetic
ggaucccuccau

SEQ ID NO: 3315 - RNA, 12 nt, Artificial Sequence
  Synthetic
gaucccuccauc

SEQ ID NO: 3316 - RNA, 12 nt, Artificial Sequence
  Synthetic
aucccuccaucc

SEQ ID NO: 3317 - RNA, 12 nt, Artificial Sequence
  Synthetic
ucccuccauccg

SEQ ID NO: 3318 - RNA, 12 nt, Artificial Sequence
  Synthetic
cccuccauccgg

SEQ ID NO: 3319 - RNA, 12 nt, Artificial Sequence
  Synthetic
ccuccauccggc

SEQ ID NO: 3320 - RNA, 12 nt, Artificial Sequence
  Synthetic
cuccauccggcu

SEQ ID NO: 3321 - RNA, 12 nt, Artificial Sequence
  Synthetic
uccauccggcuc

SEQ ID NO: 3322 - RNA, 12 nt, Artificial Sequence
  Synthetic
ccauccggcucc

SEQ ID NO: 3323 - RNA, 12 nt, Artificial Sequence
  Synthetic
cauccggcuccu

SEQ ID NO: 3324 - RNA, 12 nt, Artificial Sequence
  Synthetic
auccggcuccug

SEQ ID NO: 3325 - RNA, 12 nt, Artificial Sequence
  Synthetic
uccggcuccugu

SEQ ID NO: 3326 - RNA, 12 nt, Artificial Sequence
  Synthetic
ccggcuccuguc

SEQ ID NO: 3327 - RNA, 12 nt, Artificial Sequence
  Synthetic
cggcuccuguca

SEQ ID NO: 3328 - RNA, 12 nt, Artificial Sequence
  Synthetic
ggcuccugucau

SEQ ID NO: 3329 - RNA, 12 nt, Artificial Sequence
  Synthetic
gcuccugucauc

SEQ ID NO: 3330 - RNA, 12 nt, Artificial Sequence
  Synthetic
cuccugucaucc

SEQ ID NO: 3331 - RNA, 12 nt, Artificial Sequence
  Synthetic
uccugucauccc

SEQ ID NO: 3332 - RNA, 12 nt, Artificial Sequence
  Synthetic
ccugucaucccc

SEQ ID NO: 3333 - RNA, 12 nt, Artificial Sequence
  Synthetic
cugucauccccu

SEQ ID NO: 3334 - RNA, 12 nt, Artificial Sequence
  Synthetic
ugucauccccua

SEQ ID NO: 3335 - RNA, 12 nt, Artificial Sequence
  Synthetic
gucauccccuac

SEQ ID NO: 3336 - RNA, 12 nt, Artificial Sequence
  Synthetic
ucauccccuaca

SEQ ID NO: 3337 - RNA, 12 nt, Artificial Sequence
  Synthetic
cauccccuacac

SEQ ID NO: 3338 - RNA, 12 nt, Artificial Sequence
  Synthetic
auccccuacacu

SEQ ID NO: 3339 - RNA, 12 nt, Artificial Sequence
  Synthetic
uccccuacacuu

SEQ ID NO: 3340 - RNA, 12 nt, Artificial Sequence
  Synthetic
ccccuacacuuu

SEQ ID NO: 3341 - RNA, 12 nt, Artificial Sequence
  Synthetic
cccuacacuuug

SEQ ID NO: 3342 - RNA, 12 nt, Artificial Sequence
  Synthetic
ccuacacuuugg

SEQ ID NO: 3343 - RNA, 12 nt, Artificial Sequence
  Synthetic
cuacacuuuggc

SEQ ID NO: 3344 - RNA, 12 nt, Artificial Sequence
  Synthetic
uacacuuuggcc

SEQ ID NO: 3345 - RNA, 12 nt, Artificial Sequence
  Synthetic
acacuuuggcca

SEQ ID NO: 3346 - RNA, 12 nt, Artificial Sequence
  Synthetic
cacuuuggccaa

SEQ ID NO: 3347 - RNA, 12 nt, Artificial Sequence
  Synthetic
acuuuggccaag

SEQ ID NO: 3348 - RNA, 12 nt, Artificial Sequence
  Synthetic
cuuuggccaagc

SEQ ID NO: 3349 - RNA, 12 nt, Artificial Sequence
  Synthetic
uuuggccaagca

SEQ ID NO: 3350 - RNA, 12 nt, Artificial Sequence
  Synthetic
uuggccaagcaa

SEQ ID NO: 3351 - RNA, 12 nt, Artificial Sequence
  Synthetic
uggccaagcaag

SEQ ID NO: 3352 - RNA, 12 nt, Artificial Sequence
  Synthetic
ggccaagcaaga

SEQ ID NO: 3353 - RNA, 12 nt, Artificial Sequence
  Synthetic
gccaagcaagag

SEQ ID NO: 3354 - RNA, 12 nt, Artificial Sequence
  Synthetic
ccaagcaagagg

SEQ ID NO: 3355 - RNA, 12 nt, Artificial Sequence
  Synthetic
caagcaagaggu

SEQ ID NO: 3356 - RNA, 12 nt, Artificial Sequence
  Synthetic
aagcaagaggug

SEQ ID NO: 3357 - RNA, 12 nt, Artificial Sequence
  Synthetic
agcaagaggugg

SEQ ID NO: 3358 - RNA, 12 nt, Artificial Sequence
  Synthetic
gcaagagguggu

SEQ ID NO: 3359 - RNA, 12 nt, Artificial Sequence
  Synthetic
caagagguggua

SEQ ID NO: 3360 - RNA, 12 nt, Artificial Sequence
  Synthetic
aagaggugguag

SEQ ID NO: 3361 - RNA, 12 nt, Artificial Sequence
  Synthetic
agaggugguaga

SEQ ID NO: 3362 - RNA, 12 nt, Artificial Sequence
  Synthetic
gaggugguagaa

SEQ ID NO: 3363 - RNA, 12 nt, Artificial Sequence
  Synthetic
aggugguagaac

SEQ ID NO: 3364 - RNA, 12 nt, Artificial Sequence
  Synthetic
ggugguagaacc

SEQ ID NO: 3365 - RNA, 12 nt, Artificial Sequence
  Synthetic
gugguagaacca

SEQ ID NO: 3366 - RNA, 12 nt, Artificial Sequence
  Synthetic
ugguagaaccac

SEQ ID NO: 3367 - RNA, 12 nt, Artificial Sequence
  Synthetic
gguagaaccacu

SEQ ID NO: 3368 - RNA, 12 nt, Artificial Sequence
  Synthetic
guagaaccacuu

SEQ ID NO: 3369 - RNA, 12 nt, Artificial Sequence
  Synthetic
uagaaccacuug

SEQ ID NO: 3370 - RNA, 12 nt, Artificial Sequence
  Synthetic
agaaccacuugg

SEQ ID NO: 3371 - RNA, 12 nt, Artificial Sequence
  Synthetic
gaaccacuuggc

SEQ ID NO: 3372 - RNA, 12 nt, Artificial Sequence
  Synthetic
aaccacuuggcu

SEQ ID NO: 3373 - RNA, 12 nt, Artificial Sequence
  Synthetic
accacuuggcug

SEQ ID NO: 3374 - RNA, 12 nt, Artificial Sequence
  Synthetic
ccacuuggcugc

SEQ ID NO: 3375 - RNA, 12 nt, Artificial Sequence
  Synthetic
cacuuggcugcu

SEQ ID NO: 3376 - RNA, 12 nt, Artificial Sequence
  Synthetic
acuuggcugcuc

SEQ ID NO: 3377 - RNA, 12 nt, Artificial Sequence
  Synthetic
cuuggcugcuca

SEQ ID NO: 3378 - RNA, 12 nt, Artificial Sequence
  Synthetic
uuggcugcucau

SEQ ID NO: 3379 - RNA, 12 nt, Artificial Sequence
  Synthetic
uggcugcucauu

SEQ ID NO: 3380 - RNA, 12 nt, Artificial Sequence
  Synthetic
ggcugcucauuc

SEQ ID NO: 3381 - RNA, 12 nt, Artificial Sequence
  Synthetic
gcugcucauucc

SEQ ID NO: 3382 - RNA, 12 nt, Artificial Sequence
  Synthetic
cugcucauuccu

SEQ ID NO: 3383 - RNA, 12 nt, Artificial Sequence
  Synthetic
ugcucauuccuu

SEQ ID NO: 3384 - RNA, 12 nt, Artificial Sequence
  Synthetic
gcucauuccuuc

SEQ ID NO: 3385 - RNA, 12 nt, Artificial Sequence
  Synthetic
cucauuccuucu

SEQ ID NO: 3386 - RNA, 12 nt, Artificial Sequence
  Synthetic
ucauuccuucug

SEQ ID NO: 3387 - RNA, 12 nt, Artificial Sequence
  Synthetic
cauuccuucugg

SEQ ID NO: 3388 - RNA, 12 nt, Artificial Sequence
  Synthetic
auuccuucugga

SEQ ID NO: 3389 - RNA, 12 nt, Artificial Sequence
  Synthetic
uuccuucuggag

SEQ ID NO: 3390 - RNA, 12 nt, Artificial Sequence
  Synthetic
uccuucuggagg

SEQ ID NO: 3391 - RNA, 12 nt, Artificial Sequence
  Synthetic
ccuucuggagga

SEQ ID NO: 3392 - RNA, 12 nt, Artificial Sequence
  Synthetic
cuucuggaggac

SEQ ID NO: 3393 - RNA, 12 nt, Artificial Sequence
  Synthetic
uucuggaggaca

SEQ ID NO: 3394 - RNA, 12 nt, Artificial Sequence
  Synthetic
ucuggaggacac

SEQ ID NO: 3395 - RNA, 12 nt, Artificial Sequence
  Synthetic
cuggaggacaca

SEQ ID NO: 3396 - RNA, 12 nt, Artificial Sequence
  Synthetic
uggaggacacac

SEQ ID NO: 3397 - RNA, 12 nt, Artificial Sequence
  Synthetic
ggaggacacaca

SEQ ID NO: 3398 - RNA, 12 nt, Artificial Sequence
  Synthetic
gaggacacacag

SEQ ID NO: 3399 - RNA, 12 nt, Artificial Sequence
  Synthetic
aggacacacagu

SEQ ID NO: 3400 - RNA, 12 nt, Artificial Sequence
  Synthetic
ggacacacaguc

SEQ ID NO: 3401 - RNA, 12 nt, Artificial Sequence
  Synthetic
gacacacagucu

SEQ ID NO: 3402 - RNA, 12 nt, Artificial Sequence
  Synthetic
acacacagucuc

SEQ ID NO: 3403 - RNA, 12 nt, Artificial Sequence
  Synthetic
cacacagucuca

SEQ ID NO: 3404 - RNA, 12 nt, Artificial Sequence
  Synthetic
acacagucucag

SEQ ID NO: 3405 - RNA, 12 nt, Artificial Sequence
  Synthetic
cacagucucagu

SEQ ID NO: 3406 - RNA, 12 nt, Artificial Sequence
  Synthetic
acagucucaguc

SEQ ID NO: 3407 - RNA, 12 nt, Artificial Sequence
  Synthetic
cagucucagucc

SEQ ID NO: 3408 - RNA, 12 nt, Artificial Sequence
  Synthetic
agucucagucca

SEQ ID NO: 3409 - RNA, 12 nt, Artificial Sequence
  Synthetic
gucucaguccag

SEQ ID NO: 3410 - RNA, 12 nt, Artificial Sequence
  Synthetic
ucucaguccaga

SEQ ID NO: 3411 - RNA, 12 nt, Artificial Sequence
  Synthetic
cucaguccagau

SEQ ID NO: 3412 - RNA, 12 nt, Artificial Sequence
  Synthetic
ucaguccagaug

SEQ ID NO: 3413 - RNA, 12 nt, Artificial Sequence
  Synthetic
caguccagaugc

SEQ ID NO: 3414 - RNA, 12 nt, Artificial Sequence
  Synthetic
aguccagaugcc

SEQ ID NO: 3415 - RNA, 12 nt, Artificial Sequence
  Synthetic
guccagaugccu

SEQ ID NO: 3416 - RNA, 12 nt, Artificial Sequence
  Synthetic
uccagaugccuu

SEQ ID NO: 3417 - RNA, 12 nt, Artificial Sequence
  Synthetic
ccagaugccuuc

SEQ ID NO: 3418 - RNA, 12 nt, Artificial Sequence
  Synthetic
cagaugccuucc

SEQ ID NO: 3419 - RNA, 12 nt, Artificial Sequence
  Synthetic
agaugccuuccu

SEQ ID NO: 3420 - RNA, 12 nt, Artificial Sequence
  Synthetic
gaugccuuccug

SEQ ID NO: 3421 - RNA, 12 nt, Artificial Sequence
  Synthetic
augccuuccugu

SEQ ID NO: 3422 - RNA, 12 nt, Artificial Sequence
  Synthetic
ugccuuccuguc

SEQ ID NO: 3423 - RNA, 12 nt, Artificial Sequence
  Synthetic
gccuuccugucu

SEQ ID NO: 3424 - RNA, 12 nt, Artificial Sequence
  Synthetic
ccuuccugucuu

SEQ ID NO: 3425 - RNA, 12 nt, Artificial Sequence
  Synthetic
cuuccugucuuu

SEQ ID NO: 3426 - RNA, 12 nt, Artificial Sequence
  Synthetic
uuccugucuuuc

SEQ ID NO: 3427 - RNA, 12 nt, Artificial Sequence
  Synthetic
uccugucuuucu

SEQ ID NO: 3428 - RNA, 12 nt, Artificial Sequence
  Synthetic
ccugucuuucug

SEQ ID NO: 3429 - RNA, 12 nt, Artificial Sequence
  Synthetic
cugucuuucugg

SEQ ID NO: 3430 - RNA, 12 nt, Artificial Sequence
  Synthetic
ugucuuucuggc

SEQ ID NO: 3431 - RNA, 12 nt, Artificial Sequence
  Synthetic
gucuuucuggcc

SEQ ID NO: 3432 - RNA, 12 nt, Artificial Sequence
  Synthetic
ucuuucuggccc

SEQ ID NO: 3433 - RNA, 12 nt, Artificial Sequence
  Synthetic
cuuucuggcccu

SEQ ID NO: 3434 - RNA, 12 nt, Artificial Sequence
  Synthetic
uuucuggcccuu

SEQ ID NO: 3435 - RNA, 12 nt, Artificial Sequence
  Synthetic
uucuggcccuuu

SEQ ID NO: 3436 - RNA, 12 nt, Artificial Sequence
  Synthetic
ucuggcccuuuc

SEQ ID NO: 3437 - RNA, 12 nt, Artificial Sequence
  Synthetic
cuggcccuuucu

SEQ ID NO: 3438 - RNA, 12 nt, Artificial Sequence
  Synthetic
uggcccuuucug

SEQ ID NO: 3439 - RNA, 12 nt, Artificial Sequence
  Synthetic
ggcccuuucugg

SEQ ID NO: 3440 - RNA, 12 nt, Artificial Sequence
  Synthetic
gcccuuucugga

SEQ ID NO: 3441 - RNA, 12 nt, Artificial Sequence
  Synthetic
cccuuucuggac

SEQ ID NO: 3442 - RNA, 12 nt, Artificial Sequence
  Synthetic
ccuuucuggacc

SEQ ID NO: 3443 - RNA, 12 nt, Artificial Sequence
  Synthetic
cuuucuggacca

SEQ ID NO: 3444 - RNA, 12 nt, Artificial Sequence
  Synthetic
uuucuggaccag

SEQ ID NO: 3445 - RNA, 12 nt, Artificial Sequence
  Synthetic
uucuggaccaga

SEQ ID NO: 3446 - RNA, 12 nt, Artificial Sequence
  Synthetic
ucuggaccagau

SEQ ID NO: 3447 - RNA, 12 nt, Artificial Sequence
  Synthetic
cuggaccagauc

SEQ ID NO: 3448 - RNA, 12 nt, Artificial Sequence
  Synthetic
uggaccagaucc

SEQ ID NO: 3449 - RNA, 12 nt, Artificial Sequence
  Synthetic
ggaccagauccu

SEQ ID NO: 3450 - RNA, 12 nt, Artificial Sequence
  Synthetic
gaccagauccua

SEQ ID NO: 3451 - RNA, 12 nt, Artificial Sequence
  Synthetic
accagauccuac

SEQ ID NO: 3452 - RNA, 12 nt, Artificial Sequence
  Synthetic
ccagauccuacu

SEQ ID NO: 3453 - RNA, 12 nt, Artificial Sequence
  Synthetic
cagauccuacuc

SEQ ID NO: 3454 - RNA, 12 nt, Artificial Sequence
  Synthetic
agauccuacucu

SEQ ID NO: 3455 - RNA, 12 nt, Artificial Sequence
  Synthetic
gauccuacucuu

SEQ ID NO: 3456 - RNA, 12 nt, Artificial Sequence
  Synthetic
auccuacucuuc

SEQ ID NO: 3457 - RNA, 12 nt, Artificial Sequence
  Synthetic
uccuacucuucc

SEQ ID NO: 3458 - RNA, 12 nt, Artificial Sequence
  Synthetic
ccuacucuuccu

SEQ ID NO: 3459 - RNA, 12 nt, Artificial Sequence
  Synthetic
cuacucuuccuu

SEQ ID NO: 3460 - RNA, 12 nt, Artificial Sequence
  Synthetic
uacucuuccuuu

SEQ ID NO: 3461 - RNA, 12 nt, Artificial Sequence
  Synthetic
acucuuccuuuc

SEQ ID NO: 3462 - RNA, 12 nt, Artificial Sequence
  Synthetic
cucuuccuuucu

SEQ ID NO: 3463 - RNA, 12 nt, Artificial Sequence
  Synthetic
ucuuccuuucua

SEQ ID NO: 3464 - RNA, 12 nt, Artificial Sequence
  Synthetic
cuuccuuucuaa

SEQ ID NO: 3465 - RNA, 12 nt, Artificial Sequence
  Synthetic
uuccuuucuaaa

SEQ ID NO: 3466 - RNA, 12 nt, Artificial Sequence
  Synthetic
uccuuucuaaau

SEQ ID NO: 3467 - RNA, 12 nt, Artificial Sequence
  Synthetic
ccuuucuaaauc

SEQ ID NO: 3468 - RNA, 12 nt, Artificial Sequence
  Synthetic
cuuucuaaaucu

SEQ ID NO: 3469 - RNA, 12 nt, Artificial Sequence
  Synthetic
uuucuaaaucug

SEQ ID NO: 3470 - RNA, 12 nt, Artificial Sequence
  Synthetic
uucuaaaucuga

SEQ ID NO: 3471 - RNA, 12 nt, Artificial Sequence
  Synthetic
ucuaaaucugag

SEQ ID NO: 3472 - RNA, 12 nt, Artificial Sequence
  Synthetic
cuaaaucugaga

SEQ ID NO: 3473 - RNA, 12 nt, Artificial Sequence
  Synthetic
uaaaucugagau

SEQ ID NO: 3474 - RNA, 12 nt, Artificial Sequence
  Synthetic
aaaucugagauc

SEQ ID NO: 3475 - RNA, 12 nt, Artificial Sequence
  Synthetic
aaucugagaucu

SEQ ID NO: 3476 - RNA, 12 nt, Artificial Sequence
  Synthetic
aucugagaucuc

SEQ ID NO: 3477 - RNA, 12 nt, Artificial Sequence
  Synthetic
ucugagaucucc

SEQ ID NO: 3478 - RNA, 12 nt, Artificial Sequence
  Synthetic
cugagaucuccc

SEQ ID NO: 3479 - RNA, 12 nt, Artificial Sequence
  Synthetic
ugagaucucccu

SEQ ID NO: 3480 - RNA, 12 nt, Artificial Sequence
  Synthetic
gagaucucccuc

SEQ ID NO: 3481 - RNA, 12 nt, Artificial Sequence
  Synthetic
agaucucccucc

SEQ ID NO: 3482 - RNA, 12 nt, Artificial Sequence
  Synthetic
gaucucccucca

SEQ ID NO: 3483 - RNA, 12 nt, Artificial Sequence
  Synthetic
aucucccuccag

SEQ ID NO: 3484 - RNA, 12 nt, Artificial Sequence
  Synthetic
ucucccuccagg

SEQ ID NO: 3485 - RNA, 12 nt, Artificial Sequence
  Synthetic
cucccuccaggg

SEQ ID NO: 3486 - RNA, 12 nt, Artificial Sequence
  Synthetic
ucccuccaggga

SEQ ID NO: 3487 - RNA, 12 nt, Artificial Sequence
  Synthetic
cccuccagggaa

SEQ ID NO: 3488 - RNA, 12 nt, Artificial Sequence
  Synthetic
ccuccagggaau

SEQ ID NO: 3489 - RNA, 12 nt, Artificial Sequence
  Synthetic
cuccagggaauc

SEQ ID NO: 3490 - RNA, 12 nt, Artificial Sequence
  Synthetic
uccagggaaucc

SEQ ID NO: 3491 - RNA, 12 nt, Artificial Sequence
  Synthetic
ccagggaauccg

SEQ ID NO: 3492 - RNA, 12 nt, Artificial Sequence
  Synthetic
cagggaauccgc

SEQ ID NO: 3493 - RNA, 12 nt, Artificial Sequence
  Synthetic
agggaauccgcc

SEQ ID NO: 3494 - RNA, 12 nt, Artificial Sequence
  Synthetic
gggaauccgccu

SEQ ID NO: 3495 - RNA, 12 nt, Artificial Sequence
  Synthetic
ggaauccgccug

SEQ ID NO: 3496 - RNA, 12 nt, Artificial Sequence
  Synthetic
gaauccgccugc

SEQ ID NO: 3497 - RNA, 12 nt, Artificial Sequence
  Synthetic
aauccgccugca

SEQ ID NO: 3498 - RNA, 12 nt, Artificial Sequence
  Synthetic
auccgccugcag

SEQ ID NO: 3499 - RNA, 12 nt, Artificial Sequence
  Synthetic
uccgccugcaga

SEQ ID NO: 3500 - RNA, 12 nt, Artificial Sequence
  Synthetic
ccgccugcagag

SEQ ID NO: 3501 - RNA, 12 nt, Artificial Sequence
  Synthetic
cgccugcagagg

SEQ ID NO: 3502 - RNA, 12 nt, Artificial Sequence
  Synthetic
gccugcagagga

SEQ ID NO: 3503 - RNA, 12 nt, Artificial Sequence
  Synthetic
ccugcagaggac

SEQ ID NO: 3504 - RNA, 12 nt, Artificial Sequence
  Synthetic
cugcagaggaca

SEQ ID NO: 3505 - RNA, 12 nt, Artificial Sequence
  Synthetic
ugcagaggacag

SEQ ID NO: 3506 - RNA, 12 nt, Artificial Sequence
  Synthetic
gcagaggacaga

SEQ ID NO: 3507 - RNA, 12 nt, Artificial Sequence
  Synthetic
cagaggacagag

SEQ ID NO: 3508 - RNA, 12 nt, Artificial Sequence
  Synthetic
agaggacagagc

SEQ ID NO: 3509 - RNA, 12 nt, Artificial Sequence
  Synthetic
gaggacagagcu

SEQ ID NO: 3510 - RNA, 12 nt, Artificial Sequence
  Synthetic
aggacagagcug

SEQ ID NO: 3511 - RNA, 12 nt, Artificial Sequence
  Synthetic
ggacagagcugg

SEQ ID NO: 3512 - RNA, 12 nt, Artificial Sequence
  Synthetic
gacagagcuggc

SEQ ID NO: 3513 - RNA, 12 nt, Artificial Sequence
  Synthetic
acagagcuggcu

SEQ ID NO: 3514 - RNA, 12 nt, Artificial Sequence
  Synthetic
cagagcuggcug

SEQ ID NO: 3515 - RNA, 12 nt, Artificial Sequence
  Synthetic
agagcuggcugu

SEQ ID NO: 3516 - RNA, 12 nt, Artificial Sequence
  Synthetic
gagcuggcuguc

SEQ ID NO: 3517 - RNA, 12 nt, Artificial Sequence
  Synthetic
agcuggcugucu

SEQ ID NO: 3518 - RNA, 12 nt, Artificial Sequence
  Synthetic
gcuggcugucuu

SEQ ID NO: 3519 - RNA, 12 nt, Artificial Sequence
  Synthetic
cuggcugucuuc

SEQ ID NO: 3520 - RNA, 12 nt, Artificial Sequence
  Synthetic
uggcugucuucc

SEQ ID NO: 3521 - RNA, 12 nt, Artificial Sequence
  Synthetic
ggcugucuuccc

SEQ ID NO: 3522 - RNA, 12 nt, Artificial Sequence
  Synthetic
gcugucuucccc

SEQ ID NO: 3523 - RNA, 12 nt, Artificial Sequence
  Synthetic
cugucuuccccc

SEQ ID NO: 3524 - RNA, 12 nt, Artificial Sequence
  Synthetic
ugucuuccccca

SEQ ID NO: 3525 - RNA, 12 nt, Artificial Sequence
  Synthetic
gucuucccccac

SEQ ID NO: 3526 - RNA, 12 nt, Artificial Sequence
  Synthetic
ucuucccccacc

SEQ ID NO: 3527 - RNA, 12 nt, Artificial Sequence
  Synthetic
cuucccccaccc

SEQ ID NO: 3528 - RNA, 12 nt, Artificial Sequence
  Synthetic
uucccccacccc

SEQ ID NO: 3529 - RNA, 12 nt, Artificial Sequence
  Synthetic
ucccccaccccu

SEQ ID NO: 3530 - RNA, 12 nt, Artificial Sequence
  Synthetic
cccccaccccua

SEQ ID NO: 3531 - RNA, 12 nt, Artificial Sequence
  Synthetic
ccccaccccuaa

SEQ ID NO: 3532 - RNA, 12 nt, Artificial Sequence
  Synthetic
cccaccccuaac

SEQ ID NO: 3533 - RNA, 12 nt, Artificial Sequence
  Synthetic
ccaccccuaacc

SEQ ID NO: 3534 - RNA, 12 nt, Artificial Sequence
  Synthetic
caccccuaaccu

SEQ ID NO: 3535 - RNA, 12 nt, Artificial Sequence
  Synthetic
accccuaaccug

SEQ ID NO: 3536 - RNA, 12 nt, Artificial Sequence
  Synthetic
ccccuaaccugg

SEQ ID NO: 3537 - RNA, 12 nt, Artificial Sequence
  Synthetic
cccuaaccuggc

SEQ ID NO: 3538 - RNA, 12 nt, Artificial Sequence
  Synthetic
ccuaaccuggcu

SEQ ID NO: 3539 - RNA, 12 nt, Artificial Sequence
  Synthetic
cuaaccuggcuu

SEQ ID NO: 3540 - RNA, 12 nt, Artificial Sequence
  Synthetic
uaaccuggcuua

SEQ ID NO: 3541 - RNA, 12 nt, Artificial Sequence
  Synthetic
aaccuggcuuau

SEQ ID NO: 3542 - RNA, 12 nt, Artificial Sequence
  Synthetic
accuggcuuauu

SEQ ID NO: 3543 - RNA, 12 nt, Artificial Sequence
  Synthetic
ccuggcuuauuc

SEQ ID NO: 3544 - RNA, 12 nt, Artificial Sequence
  Synthetic
cuggcuuauucc

SEQ ID NO: 3545 - RNA, 12 nt, Artificial Sequence
  Synthetic
uggcuuauuccc

SEQ ID NO: 3546 - RNA, 12 nt, Artificial Sequence
  Synthetic
ggcuuauuccca

SEQ ID NO: 3547 - RNA, 12 nt, Artificial Sequence
  Synthetic
gcuuauucccaa

SEQ ID NO: 3548 - RNA, 12 nt, Artificial Sequence
  Synthetic
cuuauucccaac

SEQ ID NO: 3549 - RNA, 12 nt, Artificial Sequence
  Synthetic
uuauucccaacu

SEQ ID NO: 3550 - RNA, 12 nt, Artificial Sequence
  Synthetic
uauucccaacug

SEQ ID NO: 3551 - RNA, 12 nt, Artificial Sequence
  Synthetic
auucccaacugc

SEQ ID NO: 3552 - RNA, 12 nt, Artificial Sequence
  Synthetic
uucccaacugcu

SEQ ID NO: 3553 - RNA, 12 nt, Artificial Sequence
  Synthetic
ucccaacugcuc

SEQ ID NO: 3554 - RNA, 12 nt, Artificial Sequence
  Synthetic
cccaacugcucu

SEQ ID NO: 3555 - RNA, 12 nt, Artificial Sequence
  Synthetic
ccaacugcucug

SEQ ID NO: 3556 - RNA, 12 nt, Artificial Sequence
  Synthetic
caacugcucugc

SEQ ID NO: 3557 - RNA, 12 nt, Artificial Sequence
  Synthetic
aacugcucugcc

SEQ ID NO: 3558 - RNA, 12 nt, Artificial Sequence
  Synthetic
acugcucugccc

SEQ ID NO: 3559 - RNA, 12 nt, Artificial Sequence
  Synthetic
cugcucugccca

SEQ ID NO: 3560 - RNA, 12 nt, Artificial Sequence
  Synthetic
ugcucugcccac

SEQ ID NO: 3561 - RNA, 12 nt, Artificial Sequence
  Synthetic
gcucugcccacu

SEQ ID NO: 3562 - RNA, 12 nt, Artificial Sequence
  Synthetic
cucugcccacug

SEQ ID NO: 3563 - RNA, 12 nt, Artificial Sequence
  Synthetic
ucugcccacugu

SEQ ID NO: 3564 - RNA, 12 nt, Artificial Sequence
  Synthetic
cugcccacugug

SEQ ID NO: 3565 - RNA, 12 nt, Artificial Sequence
  Synthetic
ugcccacuguga

SEQ ID NO: 3566 - RNA, 12 nt, Artificial Sequence
  Synthetic
gcccacugugaa

SEQ ID NO: 3567 - RNA, 12 nt, Artificial Sequence
  Synthetic
cccacugugaaa

SEQ ID NO: 3568 - RNA, 12 nt, Artificial Sequence
  Synthetic
ccacugugaaac

SEQ ID NO: 3569 - RNA, 12 nt, Artificial Sequence
  Synthetic
cacugugaaacc

SEQ ID NO: 3570 - RNA, 12 nt, Artificial Sequence
  Synthetic
acugugaaacca

SEQ ID NO: 3571 - RNA, 12 nt, Artificial Sequence
  Synthetic
cugugaaaccac

SEQ ID NO: 3572 - RNA, 12 nt, Artificial Sequence
  Synthetic
ugugaaaccacu

SEQ ID NO: 3573 - RNA, 12 nt, Artificial Sequence
  Synthetic
gugaaaccacua

SEQ ID NO: 3574 - RNA, 12 nt, Artificial Sequence
  Synthetic
ugaaaccacuag

SEQ ID NO: 3575 - RNA, 12 nt, Artificial Sequence
  Synthetic
gaaaccacuagg

SEQ ID NO: 3576 - RNA, 12 nt, Artificial Sequence
  Synthetic
aaaccacuaggu

SEQ ID NO: 3577 - RNA, 12 nt, Artificial Sequence
  Synthetic
aaccacuagguu

SEQ ID NO: 3578 - RNA, 12 nt, Artificial Sequence
  Synthetic
accacuagguuc

SEQ ID NO: 3579 - RNA, 12 nt, Artificial Sequence
  Synthetic
ccacuagguucu

SEQ ID NO: 3580 - RNA, 12 nt, Artificial Sequence
  Synthetic
cacuagguucua

SEQ ID NO: 3581 - RNA, 12 nt, Artificial Sequence
  Synthetic
acuagguucuag

SEQ ID NO: 3582 - RNA, 12 nt, Artificial Sequence
  Synthetic
cuagguucuagg

SEQ ID NO: 3583 - RNA, 12 nt, Artificial Sequence
  Synthetic
uagguucuaggu

SEQ ID NO: 3584 - RNA, 12 nt, Artificial Sequence
  Synthetic
agguucuagguc

SEQ ID NO: 3585 - RNA, 12 nt, Artificial Sequence
  Synthetic
gguucuaggucc

SEQ ID NO: 3586 - RNA, 12 nt, Artificial Sequence
  Synthetic
guucuagguccu

SEQ ID NO: 3587 - RNA, 12 nt, Artificial Sequence
  Synthetic
uucuagguccug

SEQ ID NO: 3588 - RNA, 12 nt, Artificial Sequence
  Synthetic
ucuagguccugg

SEQ ID NO: 3589 - RNA, 12 nt, Artificial Sequence
  Synthetic
cuagguccuggc

SEQ ID NO: 3590 - RNA, 12 nt, Artificial Sequence
  Synthetic
uagguccuggcu

SEQ ID NO: 3591 - RNA, 12 nt, Artificial Sequence
  Synthetic
agguccuggcuu

SEQ ID NO: 3592 - RNA, 12 nt, Artificial Sequence
  Synthetic
gguccuggcuuc

SEQ ID NO: 3593 - RNA, 12 nt, Artificial Sequence
  Synthetic
guccuggcuucu

SEQ ID NO: 3594 - RNA, 12 nt, Artificial Sequence
  Synthetic
uccuggcuucua

SEQ ID NO: 3595 - RNA, 12 nt, Artificial Sequence
  Synthetic
ccuggcuucuag

SEQ ID NO: 3596 - RNA, 12 nt, Artificial Sequence
  Synthetic
cuggcuucuaga

SEQ ID NO: 3597 - RNA, 12 nt, Artificial Sequence
  Synthetic
uggcuucuagau

SEQ ID NO: 3598 - RNA, 12 nt, Artificial Sequence
  Synthetic
ggcuucuagauc

SEQ ID NO: 3599 - RNA, 12 nt, Artificial Sequence
  Synthetic
gcuucuagaucu

SEQ ID NO: 3600 - RNA, 12 nt, Artificial Sequence
  Synthetic
cuucuagaucug

SEQ ID NO: 3601 - RNA, 12 nt, Artificial Sequence
  Synthetic
uucuagaucugg

SEQ ID NO: 3602 - RNA, 12 nt, Artificial Sequence
  Synthetic
ucuagaucugga

SEQ ID NO: 3603 - RNA, 12 nt, Artificial Sequence
  Synthetic
cuagaucuggaa

SEQ ID NO: 3604 - RNA, 12 nt, Artificial Sequence
  Synthetic
uagaucuggaac

SEQ ID NO: 3605 - RNA, 12 nt, Artificial Sequence
  Synthetic
agaucuggaacc

SEQ ID NO: 3606 - RNA, 12 nt, Artificial Sequence
  Synthetic
gaucuggaaccu

SEQ ID NO: 3607 - RNA, 12 nt, Artificial Sequence
  Synthetic
aucuggaaccuu

SEQ ID NO: 3608 - RNA, 12 nt, Artificial Sequence
  Synthetic
ucuggaaccuua

SEQ ID NO: 3609 - RNA, 12 nt, Artificial Sequence
  Synthetic
cuggaaccuuac

SEQ ID NO: 3610 - RNA, 12 nt, Artificial Sequence
  Synthetic
uggaaccuuacc

SEQ ID NO: 3611 - RNA, 12 nt, Artificial Sequence
  Synthetic
ggaaccuuacca

SEQ ID NO: 3612 - RNA, 12 nt, Artificial Sequence
  Synthetic
gaaccuuaccac

SEQ ID NO: 3613 - RNA, 12 nt, Artificial Sequence
  Synthetic
aaccuuaccacg

SEQ ID NO: 3614 - RNA, 12 nt, Artificial Sequence
  Synthetic
accuuaccacgu

SEQ ID NO: 3615 - RNA, 12 nt, Artificial Sequence
  Synthetic
ccuuaccacguu

SEQ ID NO: 3616 - RNA, 12 nt, Artificial Sequence
  Synthetic
cuuaccacguua

SEQ ID NO: 3617 - RNA, 12 nt, Artificial Sequence
  Synthetic
uuaccacguuac

SEQ ID NO: 3618 - RNA, 12 nt, Artificial Sequence
  Synthetic
uaccacguuacu

SEQ ID NO: 3619 - RNA, 12 nt, Artificial Sequence
  Synthetic
accacguuacug

SEQ ID NO: 3620 - RNA, 12 nt, Artificial Sequence
  Synthetic
ccacguuacugc

SEQ ID NO: 3621 - RNA, 12 nt, Artificial Sequence
  Synthetic
cacguuacugca

SEQ ID NO: 3622 - RNA, 12 nt, Artificial Sequence
  Synthetic
acguuacugcau

SEQ ID NO: 3623 - RNA, 12 nt, Artificial Sequence
  Synthetic
cguuacugcaua

SEQ ID NO: 3624 - RNA, 12 nt, Artificial Sequence
  Synthetic
guuacugcauac

SEQ ID NO: 3625 - RNA, 12 nt, Artificial Sequence
  Synthetic
uuacugcauacu

SEQ ID NO: 3626 - RNA, 12 nt, Artificial Sequence
  Synthetic
uacugcauacug

SEQ ID NO: 3627 - RNA, 12 nt, Artificial Sequence
  Synthetic
acugcauacuga

SEQ ID NO: 3628 - RNA, 12 nt, Artificial Sequence
  Synthetic
cugcauacugau

SEQ ID NO: 3629 - RNA, 12 nt, Artificial Sequence
  Synthetic
ugcauacugauc

SEQ ID NO: 3630 - RNA, 12 nt, Artificial Sequence
  Synthetic
gcauacugaucc

SEQ ID NO: 3631 - RNA, 12 nt, Artificial Sequence
  Synthetic
cauacugauccc

SEQ ID NO: 3632 - RNA, 12 nt, Artificial Sequence
  Synthetic
auacugaucccu

SEQ ID NO: 3633 - RNA, 12 nt, Artificial Sequence
  Synthetic
uacugaucccuu

SEQ ID NO: 3634 - RNA, 12 nt, Artificial Sequence
  Synthetic
acugaucccuuu

SEQ ID NO: 3635 - RNA, 12 nt, Artificial Sequence
  Synthetic
cugaucccuuuc

SEQ ID NO: 3636 - RNA, 12 nt, Artificial Sequence
  Synthetic
ugaucccuuucc

SEQ ID NO: 3637 - RNA, 12 nt, Artificial Sequence
  Synthetic
gaucccuuuccc

SEQ ID NO: 3638 - RNA, 12 nt, Artificial Sequence
  Synthetic
aucccuuuccca

SEQ ID NO: 3639 - RNA, 12 nt, Artificial Sequence
  Synthetic
ucccuuucccau

SEQ ID NO: 3640 - RNA, 12 nt, Artificial Sequence
  Synthetic
cccuuucccaug

SEQ ID NO: 3641 - RNA, 12 nt, Artificial Sequence
  Synthetic
ccuuucccauga

SEQ ID NO: 3642 - RNA, 12 nt, Artificial Sequence
  Synthetic
cuuucccaugau

SEQ ID NO: 3643 - RNA, 12 nt, Artificial Sequence
  Synthetic
uuucccaugauc

SEQ ID NO: 3644 - RNA, 12 nt, Artificial Sequence
  Synthetic
uucccaugaucc

SEQ ID NO: 3645 - RNA, 12 nt, Artificial Sequence
  Synthetic
ucccaugaucca

SEQ ID NO: 3646 - RNA, 12 nt, Artificial Sequence
  Synthetic
cccaugauccag

SEQ ID NO: 3647 - RNA, 12 nt, Artificial Sequence
  Synthetic
ccaugauccaga

SEQ ID NO: 3648 - RNA, 12 nt, Artificial Sequence
  Synthetic
caugauccagaa

SEQ ID NO: 3649 - RNA, 12 nt, Artificial Sequence
  Synthetic
augauccagaac

SEQ ID NO: 3650 - RNA, 12 nt, Artificial Sequence
  Synthetic
ugauccagaacu

SEQ ID NO: 3651 - RNA, 12 nt, Artificial Sequence
  Synthetic
gauccagaacug

SEQ ID NO: 3652 - RNA, 12 nt, Artificial Sequence
  Synthetic
auccagaacuga

SEQ ID NO: 3653 - RNA, 12 nt, Artificial Sequence
  Synthetic
uccagaacugag

SEQ ID NO: 3654 - RNA, 12 nt, Artificial Sequence
  Synthetic
ccagaacugagg

SEQ ID NO: 3655 - RNA, 12 nt, Artificial Sequence
  Synthetic
cagaacugaggu

SEQ ID NO: 3656 - RNA, 12 nt, Artificial Sequence
  Synthetic
agaacugagguc

SEQ ID NO: 3657 - RNA, 12 nt, Artificial Sequence
  Synthetic
gaacugagguca

SEQ ID NO: 3658 - RNA, 12 nt, Artificial Sequence
  Synthetic
aacugaggucac

SEQ ID NO: 3659 - RNA, 12 nt, Artificial Sequence
  Synthetic
acugaggucacu

SEQ ID NO: 3660 - RNA, 12 nt, Artificial Sequence
  Synthetic
cugaggucacug

SEQ ID NO: 3661 - RNA, 12 nt, Artificial Sequence
  Synthetic
ugaggucacugg

SEQ ID NO: 3662 - RNA, 12 nt, Artificial Sequence
  Synthetic
gaggucacuggg

SEQ ID NO: 3663 - RNA, 12 nt, Artificial Sequence
  Synthetic
aggucacugggu

SEQ ID NO: 3664 - RNA, 12 nt, Artificial Sequence
  Synthetic
ggucacuggguu

SEQ ID NO: 3665 - RNA, 12 nt, Artificial Sequence
  Synthetic
gucacuggguuc

SEQ ID NO: 3666 - RNA, 12 nt, Artificial Sequence
  Synthetic
ucacuggguucu

SEQ ID NO: 3667 - RNA, 12 nt, Artificial Sequence
  Synthetic
cacuggguucua

SEQ ID NO: 3668 - RNA, 12 nt, Artificial Sequence
  Synthetic
acuggguucuag

SEQ ID NO: 3669 - RNA, 12 nt, Artificial Sequence
  Synthetic
cuggguucuaga

SEQ ID NO: 3670 - RNA, 12 nt, Artificial Sequence
  Synthetic
uggguucuagaa

SEQ ID NO: 3671 - RNA, 12 nt, Artificial Sequence
  Synthetic
ggguucuagaac

SEQ ID NO: 3672 - RNA, 12 nt, Artificial Sequence
  Synthetic
gguucuagaacc

SEQ ID NO: 3673 - RNA, 12 nt, Artificial Sequence
  Synthetic
guucuagaaccc

SEQ ID NO: 3674 - RNA, 12 nt, Artificial Sequence
  Synthetic
uucuagaacccc

SEQ ID NO: 3675 - RNA, 12 nt, Artificial Sequence
  Synthetic
ucuagaaccccc

SEQ ID NO: 3676 - RNA, 12 nt, Artificial Sequence
  Synthetic
cuagaaccccca

SEQ ID NO: 3677 - RNA, 12 nt, Artificial Sequence
  Synthetic
uagaacccccac

SEQ ID NO: 3678 - RNA, 12 nt, Artificial Sequence
  Synthetic
agaacccccaca

SEQ ID NO: 3679 - RNA, 12 nt, Artificial Sequence
  Synthetic
gaacccccacau

SEQ ID NO: 3680 - RNA, 12 nt, Artificial Sequence
  Synthetic
aacccccacauu

SEQ ID NO: 3681 - RNA, 12 nt, Artificial Sequence
  Synthetic
acccccacauuu

SEQ ID NO: 3682 - RNA, 12 nt, Artificial Sequence
  Synthetic
cccccacauuua

SEQ ID NO: 3683 - RNA, 12 nt, Artificial Sequence
  Synthetic
ccccacauuuac

SEQ ID NO: 3684 - RNA, 12 nt, Artificial Sequence
  Synthetic
cccacauuuacc

SEQ ID NO: 3685 - RNA, 12 nt, Artificial Sequence
  Synthetic
ccacauuuaccu

SEQ ID NO: 3686 - RNA, 12 nt, Artificial Sequence
  Synthetic
cacauuuaccuc

SEQ ID NO: 3687 - RNA, 12 nt, Artificial Sequence
  Synthetic
acauuuaccucg

SEQ ID NO: 3688 - RNA, 12 nt, Artificial Sequence
  Synthetic
cauuuaccucga

SEQ ID NO: 3689 - RNA, 12 nt, Artificial Sequence
  Synthetic
auuuaccucgag

SEQ ID NO: 3690 - RNA, 12 nt, Artificial Sequence
  Synthetic
uuuaccucgagg

SEQ ID NO: 3691 - RNA, 12 nt, Artificial Sequence
  Synthetic
uuaccucgaggc

SEQ ID NO: 3692 - RNA, 12 nt, Artificial Sequence
  Synthetic
uaccucgaggcu

SEQ ID NO: 3693 - RNA, 12 nt, Artificial Sequence
  Synthetic
accucgaggcuc

SEQ ID NO: 3694 - RNA, 12 nt, Artificial Sequence
  Synthetic
ccucgaggcucu

SEQ ID NO: 3695 - RNA, 12 nt, Artificial Sequence
  Synthetic
cucgaggcucuu

SEQ ID NO: 3696 - RNA, 12 nt, Artificial Sequence
  Synthetic
ucgaggcucuuc

SEQ ID NO: 3697 - RNA, 12 nt, Artificial Sequence
  Synthetic
cgaggcucuucc

SEQ ID NO: 3698 - RNA, 12 nt, Artificial Sequence
  Synthetic
gaggcucuucca

SEQ ID NO: 3699 - RNA, 12 nt, Artificial Sequence
  Synthetic
aggcucuuccau

SEQ ID NO: 3700 - RNA, 12 nt, Artificial Sequence
  Synthetic
ggcucuuccauc

SEQ ID NO: 3701 - RNA, 12 nt, Artificial Sequence
  Synthetic
gcucuuccaucc

SEQ ID NO: 3702 - RNA, 12 nt, Artificial Sequence
  Synthetic
cucuuccauccc

SEQ ID NO: 3703 - RNA, 12 nt, Artificial Sequence
  Synthetic
ucuuccaucccc

SEQ ID NO: 3704 - RNA, 12 nt, Artificial Sequence
  Synthetic
cuuccaucccca

SEQ ID NO: 3705 - RNA, 12 nt, Artificial Sequence
  Synthetic
uuccauccccaa

SEQ ID NO: 3706 - RNA, 12 nt, Artificial Sequence
  Synthetic
uccauccccaaa

SEQ ID NO: 3707 - RNA, 12 nt, Artificial Sequence
  Synthetic
ccauccccaaac

SEQ ID NO: 3708 - RNA, 12 nt, Artificial Sequence
  Synthetic
cauccccaaacu

SEQ ID NO: 3709 - RNA, 12 nt, Artificial Sequence
  Synthetic
auccccaaacug

SEQ ID NO: 3710 - RNA, 12 nt, Artificial Sequence
  Synthetic
uccccaaacugu

SEQ ID NO: 3711 - RNA, 12 nt, Artificial Sequence
  Synthetic
ccccaaacugug

SEQ ID NO: 3712 - RNA, 12 nt, Artificial Sequence
  Synthetic
cccaaacugugc

SEQ ID NO: 3713 - RNA, 12 nt, Artificial Sequence
  Synthetic
ccaaacugugcc

SEQ ID NO: 3714 - RNA, 12 nt, Artificial Sequence
  Synthetic
caaacugugccc

SEQ ID NO: 3715 - RNA, 12 nt, Artificial Sequence
  Synthetic
aaacugugcccu

SEQ ID NO: 3716 - RNA, 12 nt, Artificial Sequence
  Synthetic
aacugugcccug

SEQ ID NO: 3717 - RNA, 12 nt, Artificial Sequence
  Synthetic
acugugcccugc

SEQ ID NO: 3718 - RNA, 12 nt, Artificial Sequence
  Synthetic
cugugcccugcc

SEQ ID NO: 3719 - RNA, 12 nt, Artificial Sequence
  Synthetic
ugugcccugccu

SEQ ID NO: 3720 - RNA, 12 nt, Artificial Sequence
  Synthetic
gugcccugccuu

SEQ ID NO: 3721 - RNA, 12 nt, Artificial Sequence
  Synthetic
ugcccugccuuc

SEQ ID NO: 3722 - RNA, 12 nt, Artificial Sequence
  Synthetic
gcccugccuuca

SEQ ID NO: 3723 - RNA, 12 nt, Artificial Sequence
  Synthetic
cccugccuucag

SEQ ID NO: 3724 - RNA, 12 nt, Artificial Sequence
  Synthetic
ccugccuucagc

SEQ ID NO: 3725 - RNA, 12 nt, Artificial Sequence
  Synthetic
cugccuucagcu

SEQ ID NO: 3726 - RNA, 12 nt, Artificial Sequence
  Synthetic
ugccuucagcuu

SEQ ID NO: 3727 - RNA, 12 nt, Artificial Sequence
  Synthetic
gccuucagcuuu

SEQ ID NO: 3728 - RNA, 12 nt, Artificial Sequence
  Synthetic
ccuucagcuuug

SEQ ID NO: 3729 - RNA, 12 nt, Artificial Sequence
  Synthetic
cuucagcuuugg

SEQ ID NO: 3730 - RNA, 12 nt, Artificial Sequence
  Synthetic
uucagcuuuggu

SEQ ID NO: 3731 - RNA, 12 nt, Artificial Sequence
  Synthetic
ucagcuuuggug

SEQ ID NO: 3732 - RNA, 12 nt, Artificial Sequence
  Synthetic
cagcuuugguga

SEQ ID NO: 3733 - RNA, 12 nt, Artificial Sequence
  Synthetic
agcuuuggugaa

SEQ ID NO: 3734 - RNA, 12 nt, Artificial Sequence
  Synthetic
gcuuuggugaaa

SEQ ID NO: 3735 - RNA, 12 nt, Artificial Sequence
  Synthetic
cuuuggugaaag

SEQ ID NO: 3736 - RNA, 12 nt, Artificial Sequence
  Synthetic
uuuggugaaagg

SEQ ID NO: 3737 - RNA, 12 nt, Artificial Sequence
  Synthetic
uuggugaaaggg

SEQ ID NO: 3738 - RNA, 12 nt, Artificial Sequence
  Synthetic
uggugaaaggga

SEQ ID NO: 3739 - RNA, 12 nt, Artificial Sequence
  Synthetic
ggugaaagggag

SEQ ID NO: 3740 - RNA, 12 nt, Artificial Sequence
  Synthetic
gugaaagggagg

SEQ ID NO: 3741 - RNA, 12 nt, Artificial Sequence
  Synthetic
ugaaagggaggg

SEQ ID NO: 3742 - RNA, 12 nt, Artificial Sequence
  Synthetic
gaaagggagggc

SEQ ID NO: 3743 - RNA, 12 nt, Artificial Sequence
  Synthetic
aaagggagggcc

SEQ ID NO: 3744 - RNA, 12 nt, Artificial Sequence
  Synthetic
aagggagggccc

SEQ ID NO: 3745 - RNA, 12 nt, Artificial Sequence
  Synthetic
agggagggcccc

SEQ ID NO: 3746 - RNA, 12 nt, Artificial Sequence
  Synthetic
gggagggccccu

SEQ ID NO: 3747 - RNA, 12 nt, Artificial Sequence
  Synthetic
ggagggccccuc

SEQ ID NO: 3748 - RNA, 12 nt, Artificial Sequence
  Synthetic
gagggccccuca

SEQ ID NO: 3749 - RNA, 12 nt, Artificial Sequence
  Synthetic
agggccccucau

SEQ ID NO: 3750 - RNA, 12 nt, Artificial Sequence
  Synthetic
gggccccucaug

SEQ ID NO: 3751 - RNA, 12 nt, Artificial Sequence
  Synthetic
ggccccucaugu

SEQ ID NO: 3752 - RNA, 12 nt, Artificial Sequence
  Synthetic
gccccucaugug

SEQ ID NO: 3753 - RNA, 12 nt, Artificial Sequence
  Synthetic
ccccucaugugu

SEQ ID NO: 3754 - RNA, 12 nt, Artificial Sequence
  Synthetic
cccucaugugug

SEQ ID NO: 3755 - RNA, 12 nt, Artificial Sequence
  Synthetic
ccucaugugugc

SEQ ID NO: 3756 - RNA, 12 nt, Artificial Sequence
  Synthetic
cucaugugugcu

SEQ ID NO: 3757 - RNA, 12 nt, Artificial Sequence
  Synthetic
ucaugugugcug

SEQ ID NO: 3758 - RNA, 12 nt, Artificial Sequence
  Synthetic
caugugugcugu

SEQ ID NO: 3759 - RNA, 12 nt, Artificial Sequence
  Synthetic
augugugcugug

SEQ ID NO: 3760 - RNA, 12 nt, Artificial Sequence
  Synthetic
ugugugcugugc

SEQ ID NO: 3761 - RNA, 12 nt, Artificial Sequence
  Synthetic
gugugcugugcu

SEQ ID NO: 3762 - RNA, 12 nt, Artificial Sequence
  Synthetic
ugugcugugcug

SEQ ID NO: 3763 - RNA, 12 nt, Artificial Sequence
  Synthetic
gugcugugcugu

SEQ ID NO: 3764 - RNA, 12 nt, Artificial Sequence
  Synthetic
ugcugugcugug

SEQ ID NO: 3765 - RNA, 12 nt, Artificial Sequence
  Synthetic
gcugugcugugu

SEQ ID NO: 3766 - RNA, 12 nt, Artificial Sequence
  Synthetic
cugugcuguguc

SEQ ID NO: 3767 - RNA, 12 nt, Artificial Sequence
  Synthetic
ugugcugugucu

SEQ ID NO: 3768 - RNA, 12 nt, Artificial Sequence
  Synthetic
gugcugugucug

SEQ ID NO: 3769 - RNA, 12 nt, Artificial Sequence
  Synthetic
ugcugugucugc

SEQ ID NO: 3770 - RNA, 12 nt, Artificial Sequence
  Synthetic
gcugugucugca

SEQ ID NO: 3771 - RNA, 12 nt, Artificial Sequence
  Synthetic
cugugucugcac

SEQ ID NO: 3772 - RNA, 12 nt, Artificial Sequence
  Synthetic
ugugucugcacc

SEQ ID NO: 3773 - RNA, 12 nt, Artificial Sequence
  Synthetic
gugucugcaccg

SEQ ID NO: 3774 - RNA, 12 nt, Artificial Sequence
  Synthetic
ugucugcaccgc

SEQ ID NO: 3775 - RNA, 12 nt, Artificial Sequence
  Synthetic
gucugcaccgcu

SEQ ID NO: 3776 - RNA, 12 nt, Artificial Sequence
  Synthetic
ucugcaccgcuu

SEQ ID NO: 3777 - RNA, 12 nt, Artificial Sequence
  Synthetic
cugcaccgcuug

SEQ ID NO: 3778 - RNA, 12 nt, Artificial Sequence
  Synthetic
ugcaccgcuugg

SEQ ID NO: 3779 - RNA, 12 nt, Artificial Sequence
  Synthetic
gcaccgcuuggu

SEQ ID NO: 3780 - RNA, 12 nt, Artificial Sequence
  Synthetic
caccgcuugguu

SEQ ID NO: 3781 - RNA, 12 nt, Artificial Sequence
  Synthetic
accgcuugguuu

SEQ ID NO: 3782 - RNA, 12 nt, Artificial Sequence
  Synthetic
ccgcuugguuug

SEQ ID NO: 3783 - RNA, 12 nt, Artificial Sequence
  Synthetic
cgcuugguuugc

SEQ ID NO: 3784 - RNA, 12 nt, Artificial Sequence
  Synthetic
gcuugguuugca

SEQ ID NO: 3785 - RNA, 12 nt, Artificial Sequence
  Synthetic
cuugguuugcag

SEQ ID NO: 3786 - RNA, 12 nt, Artificial Sequence
  Synthetic
uugguuugcagu

SEQ ID NO: 3787 - RNA, 12 nt, Artificial Sequence
  Synthetic
ugguuugcaguu

SEQ ID NO: 3788 - RNA, 12 nt, Artificial Sequence
  Synthetic
gguuugcaguug

SEQ ID NO: 3789 - RNA, 12 nt, Artificial Sequence
  Synthetic
guuugcaguuga

SEQ ID NO: 3790 - RNA, 12 nt, Artificial Sequence
  Synthetic
uuugcaguugag

SEQ ID NO: 3791 - RNA, 12 nt, Artificial Sequence
  Synthetic
uugcaguugaga

SEQ ID NO: 3792 - RNA, 12 nt, Artificial Sequence
  Synthetic
ugcaguugagag

SEQ ID NO: 3793 - RNA, 12 nt, Artificial Sequence
  Synthetic
gcaguugagagg

SEQ ID NO: 3794 - RNA, 12 nt, Artificial Sequence
  Synthetic
caguugagaggg

SEQ ID NO: 3795 - RNA, 12 nt, Artificial Sequence
  Synthetic
aguugagagggg

SEQ ID NO: 3796 - RNA, 12 nt, Artificial Sequence
  Synthetic
guugagagggga

SEQ ID NO: 3797 - RNA, 12 nt, Artificial Sequence
  Synthetic
uugagaggggag

SEQ ID NO: 3798 - RNA, 12 nt, Artificial Sequence
  Synthetic
ugagaggggagg

SEQ ID NO: 3799 - RNA, 12 nt, Artificial Sequence
  Synthetic
gagaggggaggg

SEQ ID NO: 3800 - RNA, 12 nt, Artificial Sequence
  Synthetic
agaggggagggc

SEQ ID NO: 3801 - RNA, 12 nt, Artificial Sequence
  Synthetic
gaggggagggca

SEQ ID NO: 3802 - RNA, 12 nt, Artificial Sequence
  Synthetic
aggggagggcag

SEQ ID NO: 3803 - RNA, 12 nt, Artificial Sequence
  Synthetic
ggggagggcagg

SEQ ID NO: 3804 - RNA, 12 nt, Artificial Sequence
  Synthetic
gggagggcagga

SEQ ID NO: 3805 - RNA, 12 nt, Artificial Sequence
  Synthetic
ggagggcaggag

SEQ ID NO: 3806 - RNA, 12 nt, Artificial Sequence
  Synthetic
gagggcaggagg

SEQ ID NO: 3807 - RNA, 12 nt, Artificial Sequence
  Synthetic
agggcaggaggg

SEQ ID NO: 3808 - RNA, 12 nt, Artificial Sequence
  Synthetic
gggcaggagggg

SEQ ID NO: 3809 - RNA, 12 nt, Artificial Sequence
  Synthetic
ggcaggaggggu

SEQ ID NO: 3810 - RNA, 12 nt, Artificial Sequence
  Synthetic
gcaggaggggug

SEQ ID NO: 3811 - RNA, 12 nt, Artificial Sequence
  Synthetic
caggaggggugu

SEQ ID NO: 3812 - RNA, 12 nt, Artificial Sequence
  Synthetic
aggaggggugug

SEQ ID NO: 3813 - RNA, 12 nt, Artificial Sequence
  Synthetic
ggagggguguga

SEQ ID NO: 3814 - RNA, 12 nt, Artificial Sequence
  Synthetic
gaggggugugau

SEQ ID NO: 3815 - RNA, 12 nt, Artificial Sequence
  Synthetic
aggggugugauu

SEQ ID NO: 3816 - RNA, 12 nt, Artificial Sequence
  Synthetic
ggggugugauug

SEQ ID NO: 3817 - RNA, 12 nt, Artificial Sequence
  Synthetic
gggugugauugg

SEQ ID NO: 3818 - RNA, 12 nt, Artificial Sequence
  Synthetic
ggugugauugga

SEQ ID NO: 3819 - RNA, 12 nt, Artificial Sequence
  Synthetic
gugugauuggag

SEQ ID NO: 3820 - RNA, 12 nt, Artificial Sequence
  Synthetic
ugugauuggagu

SEQ ID NO: 3821 - RNA, 12 nt, Artificial Sequence
  Synthetic
gugauuggagug

SEQ ID NO: 3822 - RNA, 12 nt, Artificial Sequence
  Synthetic
ugauuggagugu

SEQ ID NO: 3823 - RNA, 12 nt, Artificial Sequence
  Synthetic
gauuggagugug

SEQ ID NO: 3824 - RNA, 12 nt, Artificial Sequence
  Synthetic
auuggagugugu

SEQ ID NO: 3825 - RNA, 12 nt, Artificial Sequence
  Synthetic
uuggaguguguc

SEQ ID NO: 3826 - RNA, 12 nt, Artificial Sequence
  Synthetic
uggagugugucc

SEQ ID NO: 3827 - RNA, 12 nt, Artificial Sequence
  Synthetic
ggaguguguccg

SEQ ID NO: 3828 - RNA, 12 nt, Artificial Sequence
  Synthetic
gaguguguccgg

SEQ ID NO: 3829 - RNA, 12 nt, Artificial Sequence
  Synthetic
aguguguccgga

SEQ ID NO: 3830 - RNA, 12 nt, Artificial Sequence
  Synthetic
guguguccggag

SEQ ID NO: 3831 - RNA, 12 nt, Artificial Sequence
  Synthetic
uguguccggaga

SEQ ID NO: 3832 - RNA, 12 nt, Artificial Sequence
  Synthetic
guguccggagau

SEQ ID NO: 3833 - RNA, 12 nt, Artificial Sequence
  Synthetic
uguccggagaug

SEQ ID NO: 3834 - RNA, 12 nt, Artificial Sequence
  Synthetic
guccggagauga

SEQ ID NO: 3835 - RNA, 12 nt, Artificial Sequence
  Synthetic
uccggagaugag

SEQ ID NO: 3836 - RNA, 12 nt, Artificial Sequence
  Synthetic
ccggagaugaga

SEQ ID NO: 3837 - RNA, 12 nt, Artificial Sequence
  Synthetic
cggagaugagau

SEQ ID NO: 3838 - RNA, 12 nt, Artificial Sequence
  Synthetic
ggagaugagaug

SEQ ID NO: 3839 - RNA, 12 nt, Artificial Sequence
  Synthetic
gagaugagauga

SEQ ID NO: 3840 - RNA, 12 nt, Artificial Sequence
  Synthetic
agaugagaugaa

SEQ ID NO: 3841 - RNA, 12 nt, Artificial Sequence
  Synthetic
gaugagaugaaa

SEQ ID NO: 3842 - RNA, 12 nt, Artificial Sequence
  Synthetic
augagaugaaaa

SEQ ID NO: 3843 - RNA, 12 nt, Artificial Sequence
  Synthetic
ugagaugaaaaa

SEQ ID NO: 3844 - RNA, 12 nt, Artificial Sequence
  Synthetic
gagaugaaaaaa

SEQ ID NO: 3845 - RNA, 12 nt, Artificial Sequence
  Synthetic
agaugaaaaaaa

SEQ ID NO: 3846 - RNA, 12 nt, Artificial Sequence
  Synthetic
gaugaaaaaaau

SEQ ID NO: 3847 - RNA, 12 nt, Artificial Sequence
  Synthetic
augaaaaaaaua

SEQ ID NO: 3848 - RNA, 12 nt, Artificial Sequence
  Synthetic
ugaaaaaaauac

SEQ ID NO: 3849 - RNA, 12 nt, Artificial Sequence
  Synthetic
gaaaaaaauaca

SEQ ID NO: 3850 - RNA, 12 nt, Artificial Sequence
  Synthetic
aaaaaaauacau

SEQ ID NO: 3851 - RNA, 12 nt, Artificial Sequence
  Synthetic
aaaaaauacauc

SEQ ID NO: 3852 - RNA, 12 nt, Artificial Sequence
  Synthetic
aaaaauacaucu

SEQ ID NO: 3853 - RNA, 12 nt, Artificial Sequence
  Synthetic
aaaauacaucua

SEQ ID NO: 3854 - RNA, 12 nt, Artificial Sequence
  Synthetic
aaauacaucuau

SEQ ID NO: 3855 - RNA, 12 nt, Artificial Sequence
  Synthetic
aauacaucuaua

SEQ ID NO: 3856 - RNA, 12 nt, Artificial Sequence
  Synthetic
auacaucuauau

SEQ ID NO: 3857 - RNA, 12 nt, Artificial Sequence
  Synthetic
uacaucuauauu

SEQ ID NO: 3858 - RNA, 12 nt, Artificial Sequence
  Synthetic
acaucuauauuu

SEQ ID NO: 3859 - RNA, 12 nt, Artificial Sequence
  Synthetic
caucuauauuua

SEQ ID NO: 3860 - RNA, 12 nt, Artificial Sequence
  Synthetic
aucuauauuuaa

SEQ ID NO: 3861 - RNA, 12 nt, Artificial Sequence
  Synthetic
ucuauauuuaag

SEQ ID NO: 3862 - RNA, 12 nt, Artificial Sequence
  Synthetic
cuauauuuaaga

SEQ ID NO: 3863 - RNA, 12 nt, Artificial Sequence
  Synthetic
uauauuuaagaa

SEQ ID NO: 3864 - RNA, 12 nt, Artificial Sequence
  Synthetic
auauuuaagaau

SEQ ID NO: 3865 - RNA, 12 nt, Artificial Sequence
  Synthetic
uauuuaagaauc

SEQ ID NO: 3866 - RNA, 12 nt, Artificial Sequence
  Synthetic
auuuaagaaucc

SEQ ID NO: 3867 - RNA, 12 nt, Artificial Sequence
  Synthetic
uuuaagaauccc

SEQ ID NO: 3868 - RNA, 12 nt, Artificial Sequence
  Synthetic
uuaagaauccca

SEQ ID NO: 3869 - RNA, 12 nt, Artificial Sequence
  Synthetic
uaagaaucccaa

SEQ ID NO: 3870 - RNA, 12 nt, Artificial Sequence
  Synthetic
aagaaucccaaa

SEQ ID NO: 3871 - RNA, 12 nt, Artificial Sequence
  Synthetic
agaaucccaaaa

SEQ ID NO: 3872 - RNA, 12 nt, Artificial Sequence
  Synthetic
gaaucccaaaaa

SEQ ID NO: 3873 - RNA, 12 nt, Artificial Sequence
  Synthetic
aaucccaaaaaa

SEQ ID NO: 3874 - RNA, 12 nt, Artificial Sequence
  Synthetic
aucccaaaaaaa

SEQ ID NO: 3875 - RNA, 12 nt, Artificial Sequence
  Synthetic
ucccaaaaaaaa

SEQ ID NO: 3876 - RNA, 12 nt, Artificial Sequence
  Synthetic
cccaaaaaaaaa

SEQ ID NO: 3877 - RNA, 12 nt, Artificial Sequence
  Synthetic
ccaaaaaaaaaa

SEQ ID NO: 3878 - RNA, 12 nt, Artificial Sequence
  Synthetic
caaaaaaaaaaa

SEQ ID NO: 3879 - RNA, 12 nt, Artificial Sequence
  Synthetic
aaaaaaaaaaaa

SEQ ID NO: 3880 - RNA, 22 nt, Artificial Sequence
  Synthetic
uccuggcggcugcgagguuuca

SEQ ID NO: 3881 - RNA, 23 nt, Artificial Sequence
  Synthetic
uccuggcggcugcgagguuucac

SEQ ID NO: 3882 - RNA, 24 nt, Artificial Sequence
  Synthetic
uccuggcggcugcgagguuucacu

SEQ ID NO: 3883 - RNA, 25 nt, Artificial Sequence
  Synthetic
uccuggcggcugcgagguuucacug

SEQ ID NO: 3884 - RNA, 26 nt, Artificial Sequence
  Synthetic
uccuggcggcugcgagguuucacugc

SEQ ID NO: 3885 - RNA, 27 nt, Artificial Sequence
  Synthetic
uccuggcggcugcgagguuucacugca

SEQ ID NO: 3886 - RNA, 28 nt, Artificial Sequence
  Synthetic
uccuggcggcugcgagguuucacugcag

SEQ ID NO: 3887 - RNA, 29 nt, Artificial Sequence
  Synthetic
uccuggcggcugcgagguuucacugcagg

SEQ ID NO: 3888 - RNA, 30 nt, Artificial Sequence
  Synthetic
uccuggcggcugcgagguuucacugcaggg

SEQ ID NO: 3889 - RNA, 31 nt, Artificial Sequence
  Synthetic
uccuggcggcugcgagguuucacugcagggg

SEQ ID NO: 3890 - RNA, 32 nt, Artificial Sequence
  Synthetic
uccuggcggcugcgagguuucacugcaggggc

SEQ ID NO: 3891 - RNA, 32 nt, Artificial Sequence
  Synthetic
ccuggcggcugcgagguuucacugcaggggcg

SEQ ID NO: 3892 - RNA, 32 nt, Artificial Sequence
  Synthetic
cuggcggcugcgagguuucacugcaggggcgc

SEQ ID NO: 3893 - RNA, 32 nt, Artificial Sequence
  Synthetic
uggcggcugcgagguuucacugcaggggcgcc

SEQ ID NO: 3894 - RNA, 32 nt, Artificial Sequence
  Synthetic
ggcggcugcgagguuucacugcaggggcgcca

SEQ ID NO: 3895 - RNA, 32 nt, Artificial Sequence
  Synthetic
gcggcugcgagguuucacugcaggggcgccag

SEQ ID NO: 3896 - RNA, 32 nt, Artificial Sequence
  Synthetic
cggcugcgagguuucacugcaggggcgccagu

SEQ ID NO: 3897 - RNA, 32 nt, Artificial Sequence
  Synthetic
ggcugcgagguuucacugcaggggcgccagug

SEQ ID NO: 3898 - RNA, 32 nt, Artificial Sequence
  Synthetic
gcugcgagguuucacugcaggggcgccagugg

SEQ ID NO: 3899 - RNA, 32 nt, Artificial Sequence
  Synthetic
cugcgagguuucacugcaggggcgccaguggg

SEQ ID NO: 3900 - RNA, 32 nt, Artificial Sequence
  Synthetic
ugcgagguuucacugcaggggcgccagugggc

SEQ ID NO: 3901 - RNA, 32 nt, Artificial Sequence
  Synthetic
gcgagguuucacugcaggggcgccagugggcu

SEQ ID NO: 3902 - RNA, 32 nt, Artificial Sequence
  Synthetic
cgagguuucacugcaggggcgccagugggcuc

SEQ ID NO: 3903 - RNA, 32 nt, Artificial Sequence
  Synthetic
gagguuucacugcaggggcgccagugggcuca

SEQ ID NO: 3904 - RNA, 32 nt, Artificial Sequence
  Synthetic
agguuucacugcaggggcgccagugggcucag

SEQ ID NO: 3905 - RNA, 32 nt, Artificial Sequence
  Synthetic
gguuucacugcaggggcgccagugggcucagu

SEQ ID NO: 3906 - RNA, 32 nt, Artificial Sequence
  Synthetic
guuucacugcaggggcgccagugggcucagug

SEQ ID NO: 3907 - RNA, 32 nt, Artificial Sequence
  Synthetic
uuucacugcaggggcgccagugggcucaguga

SEQ ID NO: 3908 - RNA, 32 nt, Artificial Sequence
  Synthetic
uucacugcaggggcgccagugggcucagugac

SEQ ID NO: 3909 - RNA, 32 nt, Artificial Sequence
  Synthetic
ucacugcaggggcgccagugggcucagugacg

SEQ ID NO: 3910 - RNA, 32 nt, Artificial Sequence
  Synthetic
cacugcaggggcgccagugggcucagugacgc

SEQ ID NO: 3911 - RNA, 32 nt, Artificial Sequence
  Synthetic
acugcaggggcgccagugggcucagugacgcu

SEQ ID NO: 3912 - RNA, 32 nt, Artificial Sequence
  Synthetic
cugcaggggcgccagugggcucagugacgcug

SEQ ID NO: 3913 - RNA, 32 nt, Artificial Sequence
  Synthetic
ugcaggggcgccagugggcucagugacgcugc

SEQ ID NO: 3914 - RNA, 32 nt, Artificial Sequence
  Synthetic
gcaggggcgccagugggcucagugacgcugcg

SEQ ID NO: 3915 - RNA, 32 nt, Artificial Sequence
  Synthetic
caggggcgccagugggcucagugacgcugcgg

SEQ ID NO: 3916 - RNA, 32 nt, Artificial Sequence
  Synthetic
aggggcgccagugggcucagugacgcugcggc

SEQ ID NO: 3917 - RNA, 32 nt, Artificial Sequence
  Synthetic
ggggcgccagugggcucagugacgcugcggcc

SEQ ID NO: 3918 - RNA, 32 nt, Artificial Sequence
  Synthetic
gggcgccagugggcucagugacgcugcggccu

SEQ ID NO: 3919 - RNA, 32 nt, Artificial Sequence
  Synthetic
ggcgccagugggcucagugacgcugcggccuc

SEQ ID NO: 3920 - RNA, 32 nt, Artificial Sequence
  Synthetic
gcgccagugggcucagugacgcugcggccucc

SEQ ID NO: 3921 - RNA, 32 nt, Artificial Sequence
  Synthetic
cgccagugggcucagugacgcugcggccuccu

SEQ ID NO: 3922 - RNA, 32 nt, Artificial Sequence
  Synthetic
gccagugggcucagugacgcugcggccuccuu

SEQ ID NO: 3923 - RNA, 32 nt, Artificial Sequence
  Synthetic
ccagugggcucagugacgcugcggccuccuuc

SEQ ID NO: 3924 - RNA, 32 nt, Artificial Sequence
  Synthetic
cagugggcucagugacgcugcggccuccuucu

SEQ ID NO: 3925 - RNA, 32 nt, Artificial Sequence
  Synthetic
agugggcucagugacgcugcggccuccuucug

SEQ ID NO: 3926 - RNA, 32 nt, Artificial Sequence
  Synthetic
gugggcucagugacgcugcggccuccuucugc

SEQ ID NO: 3927 - RNA, 32 nt, Artificial Sequence
  Synthetic
ugggcucagugacgcugcggccuccuucugcc

SEQ ID NO: 3928 - RNA, 32 nt, Artificial Sequence
  Synthetic
gggcucagugacgcugcggccuccuucugccu

SEQ ID NO: 3929 - RNA, 32 nt, Artificial Sequence
  Synthetic
ggcucagugacgcugcggccuccuucugccua

SEQ ID NO: 3930 - RNA, 32 nt, Artificial Sequence
  Synthetic
gcucagugacgcugcggccuccuucugccuag

SEQ ID NO: 3931 - RNA, 32 nt, Artificial Sequence
  Synthetic
cucagugacgcugcggccuccuucugccuagg

SEQ ID NO: 3932 - RNA, 32 nt, Artificial Sequence
  Synthetic
ucagugacgcugcggccuccuucugccuaggu

SEQ ID NO: 3933 - RNA, 32 nt, Artificial Sequence
  Synthetic
cagugacgcugcggccuccuucugccuagguc

SEQ ID NO: 3934 - RNA, 32 nt, Artificial Sequence
  Synthetic
agugacgcugcggccuccuucugccuaggucc

SEQ ID NO: 3935 - RNA, 32 nt, Artificial Sequence
  Synthetic
gugacgcugcggccuccuucugccuagguccc

SEQ ID NO: 3936 - RNA, 32 nt, Artificial Sequence
  Synthetic
ugacgcugcggccuccuucugccuagguccca

SEQ ID NO: 3937 - RNA, 32 nt, Artificial Sequence
  Synthetic
gacgcugcggccuccuucugccuaggucccaa

SEQ ID NO: 3938 - RNA, 32 nt, Artificial Sequence
  Synthetic
acgcugcggccuccuucugccuaggucccaac

SEQ ID NO: 3939 - RNA, 32 nt, Artificial Sequence
  Synthetic
cgcugcggccuccuucugccuaggucccaacg

SEQ ID NO: 3940 - RNA, 32 nt, Artificial Sequence
  Synthetic
gcugcggccuccuucugccuaggucccaacgc

SEQ ID NO: 3941 - RNA, 32 nt, Artificial Sequence
  Synthetic
cugcggccuccuucugccuaggucccaacgcu

SEQ ID NO: 3942 - RNA, 32 nt, Artificial Sequence
  Synthetic
ugcggccuccuucugccuaggucccaacgcuu

SEQ ID NO: 3943 - RNA, 32 nt, Artificial Sequence
  Synthetic
gcggccuccuucugccuaggucccaacgcuuc

SEQ ID NO: 3944 - RNA, 32 nt, Artificial Sequence
  Synthetic
cggccuccuucugccuaggucccaacgcuucg

SEQ ID NO: 3945 - RNA, 32 nt, Artificial Sequence
  Synthetic
ggccuccuucugccuaggucccaacgcuucgg

SEQ ID NO: 3946 - RNA, 32 nt, Artificial Sequence
  Synthetic
gccuccuucugccuaggucccaacgcuucggg

SEQ ID NO: 3947 - RNA, 32 nt, Artificial Sequence
  Synthetic
ccuccuucugccuaggucccaacgcuucgggg

SEQ ID NO: 3948 - RNA, 32 nt, Artificial Sequence
  Synthetic
cuccuucugccuaggucccaacgcuucggggc

SEQ ID NO: 3949 - RNA, 32 nt, Artificial Sequence
  Synthetic
uccuucugccuaggucccaacgcuucggggca

SEQ ID NO: 3950 - RNA, 32 nt, Artificial Sequence
  Synthetic
ccuucugccuaggucccaacgcuucggggcag

SEQ ID NO: 3951 - RNA, 32 nt, Artificial Sequence
  Synthetic
cuucugccuaggucccaacgcuucggggcagg

SEQ ID NO: 3952 - RNA, 32 nt, Artificial Sequence
  Synthetic
uucugccuaggucccaacgcuucggggcaggg

SEQ ID NO: 3953 - RNA, 32 nt, Artificial Sequence
  Synthetic
ucugccuaggucccaacgcuucggggcagggg

SEQ ID NO: 3954 - RNA, 32 nt, Artificial Sequence
  Synthetic
cugccuaggucccaacgcuucggggcaggggu

SEQ ID NO: 3955 - RNA, 32 nt, Artificial Sequence
  Synthetic
ugccuaggucccaacgcuucggggcaggggug

SEQ ID NO: 3956 - RNA, 32 nt, Artificial Sequence
  Synthetic
gccuaggucccaacgcuucggggcaggggugc

SEQ ID NO: 3957 - RNA, 32 nt, Artificial Sequence
  Synthetic
ccuaggucccaacgcuucggggcaggggugcg

SEQ ID NO: 3958 - RNA, 32 nt, Artificial Sequence
  Synthetic
cuaggucccaacgcuucggggcaggggugcgg

SEQ ID NO: 3959 - RNA, 32 nt, Artificial Sequence
  Synthetic
uaggucccaacgcuucggggcaggggugcggu

SEQ ID NO: 3960 - RNA, 32 nt, Artificial Sequence
  Synthetic
aggucccaacgcuucggggcaggggugcgguc

SEQ ID NO: 3961 - RNA, 32 nt, Artificial Sequence
  Synthetic
ggucccaacgcuucggggcaggggugcggucu

SEQ ID NO: 3962 - RNA, 32 nt, Artificial Sequence
  Synthetic
gucccaacgcuucggggcaggggugcggucuu

SEQ ID NO: 3963 - RNA, 32 nt, Artificial Sequence
  Synthetic
ucccaacgcuucggggcaggggugcggucuug

SEQ ID NO: 3964 - RNA, 32 nt, Artificial Sequence
  Synthetic
cccaacgcuucggggcaggggugcggucuugc

SEQ ID NO: 3965 - RNA, 32 nt, Artificial Sequence
  Synthetic
ccaacgcuucggggcaggggugcggucuugca

SEQ ID NO: 3966 - RNA, 32 nt, Artificial Sequence
  Synthetic
caacgcuucggggcaggggugcggucuugcaa

SEQ ID NO: 3967 - RNA, 32 nt, Artificial Sequence
  Synthetic
aacgcuucggggcaggggugcggucuugcaau

SEQ ID NO: 3968 - RNA, 32 nt, Artificial Sequence
  Synthetic
acgcuucggggcaggggugcggucuugcaaua

SEQ ID NO: 3969 - RNA, 32 nt, Artificial Sequence
  Synthetic
cgcuucggggcaggggugcggucuugcaauag

SEQ ID NO: 3970 - RNA, 32 nt, Artificial Sequence
  Synthetic
gcuucggggcaggggugcggucuugcaauagg

SEQ ID NO: 3971 - RNA, 32 nt, Artificial Sequence
  Synthetic
cuucggggcaggggugcggucuugcaauagga

SEQ ID NO: 3972 - RNA, 32 nt, Artificial Sequence
  Synthetic
uucggggcaggggugcggucuugcaauaggaa

SEQ ID NO: 3973 - RNA, 32 nt, Artificial Sequence
  Synthetic
ucggggcaggggugcggucuugcaauaggaag

SEQ ID NO: 3974 - RNA, 32 nt, Artificial Sequence
  Synthetic
cggggcaggggugcggucuugcaauaggaagc

SEQ ID NO: 3975 - RNA, 32 nt, Artificial Sequence
  Synthetic
ggggcaggggugcggucuugcaauaggaagcc

SEQ ID NO: 3976 - RNA, 32 nt, Artificial Sequence
  Synthetic
gggcaggggugcggucuugcaauaggaagccg

SEQ ID NO: 3977 - RNA, 32 nt, Artificial Sequence
  Synthetic
ggcaggggugcggucuugcaauaggaagccga

SEQ ID NO: 3978 - RNA, 32 nt, Artificial Sequence
  Synthetic
gcaggggugcggucuugcaauaggaagccgag

SEQ ID NO: 3979 - RNA, 32 nt, Artificial Sequence
  Synthetic
caggggugcggucuugcaauaggaagccgagc

SEQ ID NO: 3980 - RNA, 32 nt, Artificial Sequence
  Synthetic
aggggugcggucuugcaauaggaagccgagcg

SEQ ID NO: 3981 - RNA, 32 nt, Artificial Sequence
  Synthetic
ggggugcggucuugcaauaggaagccgagcgu

SEQ ID NO: 3982 - RNA, 32 nt, Artificial Sequence
  Synthetic
gggugcggucuugcaauaggaagccgagcguc

SEQ ID NO: 3983 - RNA, 32 nt, Artificial Sequence
  Synthetic
ggugcggucuugcaauaggaagccgagcgucu

SEQ ID NO: 3984 - RNA, 32 nt, Artificial Sequence
  Synthetic
gugcggucuugcaauaggaagccgagcgucuu

SEQ ID NO: 3985 - RNA, 32 nt, Artificial Sequence
  Synthetic
ugcggucuugcaauaggaagccgagcgucuug

SEQ ID NO: 3986 - RNA, 32 nt, Artificial Sequence
  Synthetic
gcggucuugcaauaggaagccgagcgucuugc

SEQ ID NO: 3987 - RNA, 32 nt, Artificial Sequence
  Synthetic
cggucuugcaauaggaagccgagcgucuugca

SEQ ID NO: 3988 - RNA, 32 nt, Artificial Sequence
  Synthetic
ggucuugcaauaggaagccgagcgucuugcaa

SEQ ID NO: 3989 - RNA, 32 nt, Artificial Sequence
  Synthetic
gucuugcaauaggaagccgagcgucuugcaag

SEQ ID NO: 3990 - RNA, 32 nt, Artificial Sequence
  Synthetic
ucuugcaauaggaagccgagcgucuugcaagc

SEQ ID NO: 3991 - RNA, 32 nt, Artificial Sequence
  Synthetic
cuugcaauaggaagccgagcgucuugcaagcu

SEQ ID NO: 3992 - RNA, 32 nt, Artificial Sequence
  Synthetic
uugcaauaggaagccgagcgucuugcaagcuu

SEQ ID NO: 3993 - RNA, 32 nt, Artificial Sequence
  Synthetic
ugcaauaggaagccgagcgucuugcaagcuuc

SEQ ID NO: 3994 - RNA, 32 nt, Artificial Sequence
  Synthetic
gcaauaggaagccgagcgucuugcaagcuucc

SEQ ID NO: 3995 - RNA, 32 nt, Artificial Sequence
  Synthetic
caauaggaagccgagcgucuugcaagcuuccc

SEQ ID NO: 3996 - RNA, 32 nt, Artificial Sequence
  Synthetic
aauaggaagccgagcgucuugcaagcuucccg

SEQ ID NO: 3997 - RNA, 32 nt, Artificial Sequence
  Synthetic
auaggaagccgagcgucuugcaagcuucccgu

SEQ ID NO: 3998 - RNA, 32 nt, Artificial Sequence
  Synthetic
uaggaagccgagcgucuugcaagcuucccguc

SEQ ID NO: 3999 - RNA, 32 nt, Artificial Sequence
  Synthetic
aggaagccgagcgucuugcaagcuucccgucg

SEQ ID NO: 4000 - RNA, 32 nt, Artificial Sequence
  Synthetic
ggaagccgagcgucuugcaagcuucccgucgg

SEQ ID NO: 4001 - RNA, 32 nt, Artificial Sequence
  Synthetic
gaagccgagcgucuugcaagcuucccgucggg

SEQ ID NO: 4002 - RNA, 32 nt, Artificial Sequence
  Synthetic
aagccgagcgucuugcaagcuucccgucgggc

SEQ ID NO: 4003 - RNA, 32 nt, Artificial Sequence
  Synthetic
agccgagcgucuugcaagcuucccgucgggca

SEQ ID NO: 4004 - RNA, 32 nt, Artificial Sequence
  Synthetic
gccgagcgucuugcaagcuucccgucgggcac

SEQ ID NO: 4005 - RNA, 32 nt, Artificial Sequence
  Synthetic
ccgagcgucuugcaagcuucccgucgggcacc

SEQ ID NO: 4006 - RNA, 32 nt, Artificial Sequence
  Synthetic
cgagcgucuugcaagcuucccgucgggcacca

SEQ ID NO: 4007 - RNA, 32 nt, Artificial Sequence
  Synthetic
gagcgucuugcaagcuucccgucgggcaccag

SEQ ID NO: 4008 - RNA, 32 nt, Artificial Sequence
  Synthetic
agcgucuugcaagcuucccgucgggcaccagc

SEQ ID NO: 4009 - RNA, 32 nt, Artificial Sequence
  Synthetic
gcgucuugcaagcuucccgucgggcaccagcu

SEQ ID NO: 4010 - RNA, 32 nt, Artificial Sequence
  Synthetic
cgucuugcaagcuucccgucgggcaccagcua

SEQ ID NO: 4011 - RNA, 32 nt, Artificial Sequence
  Synthetic
gucuugcaagcuucccgucgggcaccagcuac

SEQ ID NO: 4012 - RNA, 32 nt, Artificial Sequence
  Synthetic
ucuugcaagcuucccgucgggcaccagcuacu

SEQ ID NO: 4013 - RNA, 32 nt, Artificial Sequence
  Synthetic
cuugcaagcuucccgucgggcaccagcuacuc

SEQ ID NO: 4014 - RNA, 32 nt, Artificial Sequence
  Synthetic
uugcaagcuucccgucgggcaccagcuacucg

SEQ ID NO: 4015 - RNA, 32 nt, Artificial Sequence
  Synthetic
ugcaagcuucccgucgggcaccagcuacucgg

SEQ ID NO: 4016 - RNA, 32 nt, Artificial Sequence
  Synthetic
gcaagcuucccgucgggcaccagcuacucggc

SEQ ID NO: 4017 - RNA, 32 nt, Artificial Sequence
  Synthetic
caagcuucccgucgggcaccagcuacucggcc

SEQ ID NO: 4018 - RNA, 32 nt, Artificial Sequence
  Synthetic
aagcuucccgucgggcaccagcuacucggccc

SEQ ID NO: 4019 - RNA, 32 nt, Artificial Sequence
  Synthetic
agcuucccgucgggcaccagcuacucggcccc

SEQ ID NO: 4020 - RNA, 32 nt, Artificial Sequence
  Synthetic
gcuucccgucgggcaccagcuacucggccccg

SEQ ID NO: 4021 - RNA, 32 nt, Artificial Sequence
  Synthetic
cuucccgucgggcaccagcuacucggccccgc

SEQ ID NO: 4022 - RNA, 32 nt, Artificial Sequence
  Synthetic
uucccgucgggcaccagcuacucggccccgca

SEQ ID NO: 4023 - RNA, 32 nt, Artificial Sequence
  Synthetic
ucccgucgggcaccagcuacucggccccgcac

SEQ ID NO: 4024 - RNA, 32 nt, Artificial Sequence
  Synthetic
cccgucgggcaccagcuacucggccccgcacc

SEQ ID NO: 4025 - RNA, 32 nt, Artificial Sequence
  Synthetic
ccgucgggcaccagcuacucggccccgcaccc

SEQ ID NO: 4026 - RNA, 32 nt, Artificial Sequence
  Synthetic
cgucgggcaccagcuacucggccccgcacccu

SEQ ID NO: 4027 - RNA, 32 nt, Artificial Sequence
  Synthetic
gucgggcaccagcuacucggccccgcacccua

SEQ ID NO: 4028 - RNA, 32 nt, Artificial Sequence
  Synthetic
ucgggcaccagcuacucggccccgcacccuac

SEQ ID NO: 4029 - RNA, 32 nt, Artificial Sequence
  Synthetic
cgggcaccagcuacucggccccgcacccuacc

SEQ ID NO: 4030 - RNA, 32 nt, Artificial Sequence
  Synthetic
gggcaccagcuacucggccccgcacccuaccu

SEQ ID NO: 4031 - RNA, 32 nt, Artificial Sequence
  Synthetic
ggcaccagcuacucggccccgcacccuaccug

SEQ ID NO: 4032 - RNA, 32 nt, Artificial Sequence
  Synthetic
gcaccagcuacucggccccgcacccuaccugg

SEQ ID NO: 4033 - RNA, 32 nt, Artificial Sequence
  Synthetic
caccagcuacucggccccgcacccuaccuggu

SEQ ID NO: 4034 - RNA, 32 nt, Artificial Sequence
  Synthetic
accagcuacucggccccgcacccuaccuggug

SEQ ID NO: 4035 - RNA, 32 nt, Artificial Sequence
  Synthetic
ccagcuacucggccccgcacccuaccuggugc

SEQ ID NO: 4036 - RNA, 32 nt, Artificial Sequence
  Synthetic
cagcuacucggccccgcacccuaccuggugca

SEQ ID NO: 4037 - RNA, 32 nt, Artificial Sequence
  Synthetic
agcuacucggccccgcacccuaccuggugcau

SEQ ID NO: 4038 - RNA, 32 nt, Artificial Sequence
  Synthetic
gcuacucggccccgcacccuaccuggugcauu

SEQ ID NO: 4039 - RNA, 32 nt, Artificial Sequence
  Synthetic
cuacucggccccgcacccuaccuggugcauuc

SEQ ID NO: 4040 - RNA, 32 nt, Artificial Sequence
  Synthetic
uacucggccccgcacccuaccuggugcauucc

SEQ ID NO: 4041 - RNA, 32 nt, Artificial Sequence
  Synthetic
acucggccccgcacccuaccuggugcauuccc

SEQ ID NO: 4042 - RNA, 32 nt, Artificial Sequence
  Synthetic
cucggccccgcacccuaccuggugcauucccu

SEQ ID NO: 4043 - RNA, 32 nt, Artificial Sequence
  Synthetic
ucggccccgcacccuaccuggugcauucccua

SEQ ID NO: 4044 - RNA, 32 nt, Artificial Sequence
  Synthetic
cggccccgcacccuaccuggugcauucccuag

SEQ ID NO: 4045 - RNA, 32 nt, Artificial Sequence
  Synthetic
ggccccgcacccuaccuggugcauucccuaga

SEQ ID NO: 4046 - RNA, 32 nt, Artificial Sequence
  Synthetic
gccccgcacccuaccuggugcauucccuagac

SEQ ID NO: 4047 - RNA, 32 nt, Artificial Sequence
  Synthetic
ccccgcacccuaccuggugcauucccuagaca

SEQ ID NO: 4048 - RNA, 32 nt, Artificial Sequence
  Synthetic
cccgcacccuaccuggugcauucccuagacac

SEQ ID NO: 4049 - RNA, 32 nt, Artificial Sequence
  Synthetic
ccgcacccuaccuggugcauucccuagacacc

SEQ ID NO: 4050 - RNA, 32 nt, Artificial Sequence
  Synthetic
cgcacccuaccuggugcauucccuagacaccu

SEQ ID NO: 4051 - RNA, 32 nt, Artificial Sequence
  Synthetic
gcacccuaccuggugcauucccuagacaccuc

SEQ ID NO: 4052 - RNA, 32 nt, Artificial Sequence
  Synthetic
cacccuaccuggugcauucccuagacaccucc

SEQ ID NO: 4053 - RNA, 32 nt, Artificial Sequence
  Synthetic
acccuaccuggugcauucccuagacaccuccg

SEQ ID NO: 4054 - RNA, 32 nt, Artificial Sequence
  Synthetic
cccuaccuggugcauucccuagacaccuccgg

SEQ ID NO: 4055 - RNA, 32 nt, Artificial Sequence
  Synthetic
ccuaccuggugcauucccuagacaccuccggg

SEQ ID NO: 4056 - RNA, 32 nt, Artificial Sequence
  Synthetic
cuaccuggugcauucccuagacaccuccgggg

SEQ ID NO: 4057 - RNA, 32 nt, Artificial Sequence
  Synthetic
uaccuggugcauucccuagacaccuccggggu

SEQ ID NO: 4058 - RNA, 32 nt, Artificial Sequence
  Synthetic
accuggugcauucccuagacaccuccgggguc

SEQ ID NO: 4059 - RNA, 32 nt, Artificial Sequence
  Synthetic
ccuggugcauucccuagacaccuccggggucc

SEQ ID NO: 4060 - RNA, 32 nt, Artificial Sequence
  Synthetic
cuggugcauucccuagacaccuccgggguccc

SEQ ID NO: 4061 - RNA, 32 nt, Artificial Sequence
  Synthetic
uggugcauucccuagacaccuccggggucccu

SEQ ID NO: 4062 - RNA, 32 nt, Artificial Sequence
  Synthetic
ggugcauucccuagacaccuccggggucccua

SEQ ID NO: 4063 - RNA, 32 nt, Artificial Sequence
  Synthetic
gugcauucccuagacaccuccggggucccuac

SEQ ID NO: 4064 - RNA, 32 nt, Artificial Sequence
  Synthetic
ugcauucccuagacaccuccggggucccuacc

SEQ ID NO: 4065 - RNA, 32 nt, Artificial Sequence
  Synthetic
gcauucccuagacaccuccggggucccuaccu

SEQ ID NO: 4066 - RNA, 32 nt, Artificial Sequence
  Synthetic
cauucccuagacaccuccggggucccuaccug

SEQ ID NO: 4067 - RNA, 32 nt, Artificial Sequence
  Synthetic
auucccuagacaccuccggggucccuaccugg

SEQ ID NO: 4068 - RNA, 32 nt, Artificial Sequence
  Synthetic
uucccuagacaccuccggggucccuaccugga

SEQ ID NO: 4069 - RNA, 32 nt, Artificial Sequence
  Synthetic
ucccuagacaccuccggggucccuaccuggag

SEQ ID NO: 4070 - RNA, 32 nt, Artificial Sequence
  Synthetic
cccuagacaccuccggggucccuaccuggaga

SEQ ID NO: 4071 - RNA, 32 nt, Artificial Sequence
  Synthetic
ccuagacaccuccggggucccuaccuggagau

SEQ ID NO: 4072 - RNA, 32 nt, Artificial Sequence
  Synthetic
cuagacaccuccggggucccuaccuggagauc

SEQ ID NO: 4073 - RNA, 32 nt, Artificial Sequence
  Synthetic
uagacaccuccggggucccuaccuggagaucc

SEQ ID NO: 4074 - RNA, 32 nt, Artificial Sequence
  Synthetic
agacaccuccggggucccuaccuggagauccc

SEQ ID NO: 4075 - RNA, 32 nt, Artificial Sequence
  Synthetic
gacaccuccggggucccuaccuggagaucccc

SEQ ID NO: 4076 - RNA, 32 nt, Artificial Sequence
  Synthetic
acaccuccggggucccuaccuggagauccccg

SEQ ID NO: 4077 - RNA, 32 nt, Artificial Sequence
  Synthetic
caccuccggggucccuaccuggagauccccgg

SEQ ID NO: 4078 - RNA, 32 nt, Artificial Sequence
  Synthetic
accuccggggucccuaccuggagauccccgga

SEQ ID NO: 4079 - RNA, 32 nt, Artificial Sequence
  Synthetic
ccuccggggucccuaccuggagauccccggag

SEQ ID NO: 4080 - RNA, 32 nt, Artificial Sequence
  Synthetic
cuccggggucccuaccuggagauccccggagc

SEQ ID NO: 4081 - RNA, 32 nt, Artificial Sequence
  Synthetic
uccggggucccuaccuggagauccccggagcc

SEQ ID NO: 4082 - RNA, 32 nt, Artificial Sequence
  Synthetic
ccggggucccuaccuggagauccccggagccc

SEQ ID NO: 4083 - RNA, 32 nt, Artificial Sequence
  Synthetic
cggggucccuaccuggagauccccggagcccc

SEQ ID NO: 4084 - RNA, 32 nt, Artificial Sequence
  Synthetic
ggggucccuaccuggagauccccggagccccc

SEQ ID NO: 4085 - RNA, 32 nt, Artificial Sequence
  Synthetic
gggucccuaccuggagauccccggagcccccc

SEQ ID NO: 4086 - RNA, 32 nt, Artificial Sequence
  Synthetic
ggucccuaccuggagauccccggagccccccu

SEQ ID NO: 4087 - RNA, 32 nt, Artificial Sequence
  Synthetic
gucccuaccuggagauccccggagccccccuu

SEQ ID NO: 4088 - RNA, 32 nt, Artificial Sequence
  Synthetic
ucccuaccuggagauccccggagccccccuuc

SEQ ID NO: 4089 - RNA, 32 nt, Artificial Sequence
  Synthetic
cccuaccuggagauccccggagccccccuucc

SEQ ID NO: 4090 - RNA, 32 nt, Artificial Sequence
  Synthetic
ccuaccuggagauccccggagccccccuuccu

SEQ ID NO: 4091 - RNA, 32 nt, Artificial Sequence
  Synthetic
cuaccuggagauccccggagccccccuuccug

SEQ ID NO: 4092 - RNA, 32 nt, Artificial Sequence
  Synthetic
uaccuggagauccccggagccccccuuccugc

SEQ ID NO: 4093 - RNA, 32 nt, Artificial Sequence
  Synthetic
accuggagauccccggagccccccuuccugcg

SEQ ID NO: 4094 - RNA, 32 nt, Artificial Sequence
  Synthetic
ccuggagauccccggagccccccuuccugcgc

SEQ ID NO: 4095 - RNA, 32 nt, Artificial Sequence
  Synthetic
cuggagauccccggagccccccuuccugcgcc

SEQ ID NO: 4096 - RNA, 32 nt, Artificial Sequence
  Synthetic
uggagauccccggagccccccuuccugcgcca

SEQ ID NO: 4097 - RNA, 32 nt, Artificial Sequence
  Synthetic
ggagauccccggagccccccuuccugcgccag

SEQ ID NO: 4098 - RNA, 32 nt, Artificial Sequence
  Synthetic
gagauccccggagccccccuuccugcgccagc

SEQ ID NO: 4099 - RNA, 32 nt, Artificial Sequence
  Synthetic
agauccccggagccccccuuccugcgccagcc

SEQ ID NO: 4100 - RNA, 32 nt, Artificial Sequence
  Synthetic
gauccccggagccccccuuccugcgccagcca

SEQ ID NO: 4101 - RNA, 32 nt, Artificial Sequence
  Synthetic
auccccggagccccccuuccugcgccagccau

SEQ ID NO: 4102 - RNA, 32 nt, Artificial Sequence
  Synthetic
uccccggagccccccuuccugcgccagccaug

SEQ ID NO: 4103 - RNA, 32 nt, Artificial Sequence
  Synthetic
ccccggagccccccuuccugcgccagccaugc

SEQ ID NO: 4104 - RNA, 32 nt, Artificial Sequence
  Synthetic
cccggagccccccuuccugcgccagccaugcc

SEQ ID NO: 4105 - RNA, 32 nt, Artificial Sequence
  Synthetic
ccggagccccccuuccugcgccagccaugccu

SEQ ID NO: 4106 - RNA, 32 nt, Artificial Sequence
  Synthetic
cggagccccccuuccugcgccagccaugccuu

SEQ ID NO: 4107 - RNA, 32 nt, Artificial Sequence
  Synthetic
ggagccccccuuccugcgccagccaugccuuu

SEQ ID NO: 4108 - RNA, 32 nt, Artificial Sequence
  Synthetic
gagccccccuuccugcgccagccaugccuuua

SEQ ID NO: 4109 - RNA, 32 nt, Artificial Sequence
  Synthetic
agccccccuuccugcgccagccaugccuuuaa

SEQ ID NO: 4110 - RNA, 32 nt, Artificial Sequence
  Synthetic
gccccccuuccugcgccagccaugccuuuaaa

SEQ ID NO: 4111 - RNA, 32 nt, Artificial Sequence
  Synthetic
ccccccuuccugcgccagccaugccuuuaaac

SEQ ID NO: 4112 - RNA, 32 nt, Artificial Sequence
  Synthetic
cccccuuccugcgccagccaugccuuuaaacc

SEQ ID NO: 4113 - RNA, 32 nt, Artificial Sequence
  Synthetic
ccccuuccugcgccagccaugccuuuaaaccg

SEQ ID NO: 4114 - RNA, 32 nt, Artificial Sequence
  Synthetic
cccuuccugcgccagccaugccuuuaaaccgc

SEQ ID NO: 4115 - RNA, 32 nt, Artificial Sequence
  Synthetic
ccuuccugcgccagccaugccuuuaaaccgca

SEQ ID NO: 4116 - RNA, 32 nt, Artificial Sequence
  Synthetic
cuuccugcgccagccaugccuuuaaaccgcac

SEQ ID NO: 4117 - RNA, 32 nt, Artificial Sequence
  Synthetic
uuccugcgccagccaugccuuuaaaccgcacu

SEQ ID NO: 4118 - RNA, 32 nt, Artificial Sequence
  Synthetic
uccugcgccagccaugccuuuaaaccgcacuu

SEQ ID NO: 4119 - RNA, 32 nt, Artificial Sequence
  Synthetic
ccugcgccagccaugccuuuaaaccgcacuuu

SEQ ID NO: 4120 - RNA, 32 nt, Artificial Sequence
  Synthetic
cugcgccagccaugccuuuaaaccgcacuuug

SEQ ID NO: 4121 - RNA, 32 nt, Artificial Sequence
  Synthetic
ugcgccagccaugccuuuaaaccgcacuuugu

SEQ ID NO: 4122 - RNA, 32 nt, Artificial Sequence
  Synthetic
gcgccagccaugccuuuaaaccgcacuuuguc

SEQ ID NO: 4123 - RNA, 32 nt, Artificial Sequence
  Synthetic
cgccagccaugccuuuaaaccgcacuuugucc

SEQ ID NO: 4124 - RNA, 32 nt, Artificial Sequence
  Synthetic
gccagccaugccuuuaaaccgcacuuugucca

SEQ ID NO: 4125 - RNA, 32 nt, Artificial Sequence
  Synthetic
ccagccaugccuuuaaaccgcacuuuguccau

SEQ ID NO: 4126 - RNA, 32 nt, Artificial Sequence
  Synthetic
cagccaugccuuuaaaccgcacuuuguccaug

SEQ ID NO: 4127 - RNA, 32 nt, Artificial Sequence
  Synthetic
agccaugccuuuaaaccgcacuuuguccaugu

SEQ ID NO: 4128 - RNA, 32 nt, Artificial Sequence
  Synthetic
gccaugccuuuaaaccgcacuuuguccauguc

SEQ ID NO: 4129 - RNA, 32 nt, Artificial Sequence
  Synthetic
ccaugccuuuaaaccgcacuuuguccaugucc

SEQ ID NO: 4130 - RNA, 32 nt, Artificial Sequence
  Synthetic
caugccuuuaaaccgcacuuuguccauguccu

SEQ ID NO: 4131 - RNA, 32 nt, Artificial Sequence
  Synthetic
augccuuuaaaccgcacuuuguccauguccuc

SEQ ID NO: 4132 - RNA, 32 nt, Artificial Sequence
  Synthetic
ugccuuuaaaccgcacuuuguccauguccuca

SEQ ID NO: 4133 - RNA, 32 nt, Artificial Sequence
  Synthetic
gccuuuaaaccgcacuuuguccauguccucac

SEQ ID NO: 4134 - RNA, 32 nt, Artificial Sequence
  Synthetic
ccuuuaaaccgcacuuuguccauguccucacu

SEQ ID NO: 4135 - RNA, 32 nt, Artificial Sequence
  Synthetic
cuuuaaaccgcacuuuguccauguccucacug

SEQ ID NO: 4136 - RNA, 32 nt, Artificial Sequence
  Synthetic
uuuaaaccgcacuuuguccauguccucacugc

SEQ ID NO: 4137 - RNA, 32 nt, Artificial Sequence
  Synthetic
uuaaaccgcacuuuguccauguccucacugcc

SEQ ID NO: 4138 - RNA, 32 nt, Artificial Sequence
  Synthetic
uaaaccgcacuuuguccauguccucacugcca

SEQ ID NO: 4139 - RNA, 32 nt, Artificial Sequence
  Synthetic
aaaccgcacuuuguccauguccucacugccag

SEQ ID NO: 4140 - RNA, 32 nt, Artificial Sequence
  Synthetic
aaccgcacuuuguccauguccucacugccagg

SEQ ID NO: 4141 - RNA, 32 nt, Artificial Sequence
  Synthetic
accgcacuuuguccauguccucacugccagga

SEQ ID NO: 4142 - RNA, 32 nt, Artificial Sequence
  Synthetic
ccgcacuuuguccauguccucacugccaggac

SEQ ID NO: 4143 - RNA, 32 nt, Artificial Sequence
  Synthetic
cgcacuuuguccauguccucacugccaggacu

SEQ ID NO: 4144 - RNA, 32 nt, Artificial Sequence
  Synthetic
gcacuuuguccauguccucacugccaggacug

SEQ ID NO: 4145 - RNA, 32 nt, Artificial Sequence
  Synthetic
cacuuuguccauguccucacugccaggacugg

SEQ ID NO: 4146 - RNA, 32 nt, Artificial Sequence
  Synthetic
acuuuguccauguccucacugccaggacugga

SEQ ID NO: 4147 - RNA, 32 nt, Artificial Sequence
  Synthetic
cuuuguccauguccucacugccaggacuggag

SEQ ID NO: 4148 - RNA, 32 nt, Artificial Sequence
  Synthetic
uuuguccauguccucacugccaggacuggagg

SEQ ID NO: 4149 - RNA, 32 nt, Artificial Sequence
  Synthetic
uuguccauguccucacugccaggacuggagga

SEQ ID NO: 4150 - RNA, 32 nt, Artificial Sequence
  Synthetic
uguccauguccucacugccaggacuggaggac

SEQ ID NO: 4151 - RNA, 32 nt, Artificial Sequence
  Synthetic
guccauguccucacugccaggacuggaggacu

SEQ ID NO: 4152 - RNA, 32 nt, Artificial Sequence
  Synthetic
uccauguccucacugccaggacuggaggacug

SEQ ID NO: 4153 - RNA, 32 nt, Artificial Sequence
  Synthetic
ccauguccucacugccaggacuggaggacugg

SEQ ID NO: 4154 - RNA, 32 nt, Artificial Sequence
  Synthetic
cauguccucacugccaggacuggaggacuggg

SEQ ID NO: 4155 - RNA, 32 nt, Artificial Sequence
  Synthetic
auguccucacugccaggacuggaggacuggga

SEQ ID NO: 4156 - RNA, 32 nt, Artificial Sequence
  Synthetic
uguccucacugccaggacuggaggacugggag

SEQ ID NO: 4157 - RNA, 32 nt, Artificial Sequence
  Synthetic
guccucacugccaggacuggaggacugggagg

SEQ ID NO: 4158 - RNA, 32 nt, Artificial Sequence
  Synthetic
uccucacugccaggacuggaggacugggagga

SEQ ID NO: 4159 - RNA, 32 nt, Artificial Sequence
  Synthetic
ccucacugccaggacuggaggacugggaggau

SEQ ID NO: 4160 - RNA, 32 nt, Artificial Sequence
  Synthetic
cucacugccaggacuggaggacugggaggaug

SEQ ID NO: 4161 - RNA, 32 nt, Artificial Sequence
  Synthetic
ucacugccaggacuggaggacugggaggauga

SEQ ID NO: 4162 - RNA, 32 nt, Artificial Sequence
  Synthetic
cacugccaggacuggaggacugggaggaugaa

SEQ ID NO: 4163 - RNA, 32 nt, Artificial Sequence
  Synthetic
acugccaggacuggaggacugggaggaugaau

SEQ ID NO: 4164 - RNA, 32 nt, Artificial Sequence
  Synthetic
cugccaggacuggaggacugggaggaugaauu

SEQ ID NO: 4165 - RNA, 32 nt, Artificial Sequence
  Synthetic
ugccaggacuggaggacugggaggaugaauuc

SEQ ID NO: 4166 - RNA, 32 nt, Artificial Sequence
  Synthetic
gccaggacuggaggacugggaggaugaauucg

SEQ ID NO: 4167 - RNA, 32 nt, Artificial Sequence
  Synthetic
ccaggacuggaggacugggaggaugaauucga

SEQ ID NO: 4168 - RNA, 32 nt, Artificial Sequence
  Synthetic
caggacuggaggacugggaggaugaauucgac

SEQ ID NO: 4169 - RNA, 32 nt, Artificial Sequence
  Synthetic
aggacuggaggacugggaggaugaauucgacc

SEQ ID NO: 4170 - RNA, 32 nt, Artificial Sequence
  Synthetic
ggacuggaggacugggaggaugaauucgaccu

SEQ ID NO: 4171 - RNA, 32 nt, Artificial Sequence
  Synthetic
gacuggaggacugggaggaugaauucgaccug

SEQ ID NO: 4172 - RNA, 32 nt, Artificial Sequence
  Synthetic
acuggaggacugggaggaugaauucgaccugg

SEQ ID NO: 4173 - RNA, 32 nt, Artificial Sequence
  Synthetic
cuggaggacugggaggaugaauucgaccugga

SEQ ID NO: 4174 - RNA, 32 nt, Artificial Sequence
  Synthetic
uggaggacugggaggaugaauucgaccuggag

SEQ ID NO: 4175 - RNA, 32 nt, Artificial Sequence
  Synthetic
ggaggacugggaggaugaauucgaccuggaga

SEQ ID NO: 4176 - RNA, 32 nt, Artificial Sequence
  Synthetic
gaggacugggaggaugaauucgaccuggagaa

SEQ ID NO: 4177 - RNA, 32 nt, Artificial Sequence
  Synthetic
aggacugggaggaugaauucgaccuggagaac

SEQ ID NO: 4178 - RNA, 32 nt, Artificial Sequence
  Synthetic
ggacugggaggaugaauucgaccuggagaacg

SEQ ID NO: 4179 - RNA, 32 nt, Artificial Sequence
  Synthetic
gacugggaggaugaauucgaccuggagaacgc

SEQ ID NO: 4180 - RNA, 32 nt, Artificial Sequence
  Synthetic
acugggaggaugaauucgaccuggagaacgca

SEQ ID NO: 4181 - RNA, 32 nt, Artificial Sequence
  Synthetic
cugggaggaugaauucgaccuggagaacgcag

SEQ ID NO: 4182 - RNA, 32 nt, Artificial Sequence
  Synthetic
ugggaggaugaauucgaccuggagaacgcagu

SEQ ID NO: 4183 - RNA, 32 nt, Artificial Sequence
  Synthetic
gggaggaugaauucgaccuggagaacgcagug

SEQ ID NO: 4184 - RNA, 32 nt, Artificial Sequence
  Synthetic
ggaggaugaauucgaccuggagaacgcagugc

SEQ ID NO: 4185 - RNA, 32 nt, Artificial Sequence
  Synthetic
gaggaugaauucgaccuggagaacgcagugcu

SEQ ID NO: 4186 - RNA, 32 nt, Artificial Sequence
  Synthetic
aggaugaauucgaccuggagaacgcagugcuc

SEQ ID NO: 4187 - RNA, 32 nt, Artificial Sequence
  Synthetic
ggaugaauucgaccuggagaacgcagugcucu

SEQ ID NO: 4188 - RNA, 32 nt, Artificial Sequence
  Synthetic
gaugaauucgaccuggagaacgcagugcucuu

SEQ ID NO: 4189 - RNA, 32 nt, Artificial Sequence
  Synthetic
augaauucgaccuggagaacgcagugcucuuc

SEQ ID NO: 4190 - RNA, 32 nt, Artificial Sequence
  Synthetic
ugaauucgaccuggagaacgcagugcucuucg

SEQ ID NO: 4191 - RNA, 32 nt, Artificial Sequence
  Synthetic
gaauucgaccuggagaacgcagugcucuucga

SEQ ID NO: 4192 - RNA, 32 nt, Artificial Sequence
  Synthetic
aauucgaccuggagaacgcagugcucuucgaa

SEQ ID NO: 4193 - RNA, 32 nt, Artificial Sequence
  Synthetic
auucgaccuggagaacgcagugcucuucgaag

SEQ ID NO: 4194 - RNA, 32 nt, Artificial Sequence
  Synthetic
uucgaccuggagaacgcagugcucuucgaagu

SEQ ID NO: 4195 - RNA, 32 nt, Artificial Sequence
  Synthetic
ucgaccuggagaacgcagugcucuucgaagug

SEQ ID NO: 4196 - RNA, 32 nt, Artificial Sequence
  Synthetic
cgaccuggagaacgcagugcucuucgaagugg

SEQ ID NO: 4197 - RNA, 32 nt, Artificial Sequence
  Synthetic
gaccuggagaacgcagugcucuucgaaguggc

SEQ ID NO: 4198 - RNA, 32 nt, Artificial Sequence
  Synthetic
accuggagaacgcagugcucuucgaaguggcc

SEQ ID NO: 4199 - RNA, 32 nt, Artificial Sequence
  Synthetic
ccuggagaacgcagugcucuucgaaguggccu

SEQ ID NO: 4200 - RNA, 32 nt, Artificial Sequence
  Synthetic
cuggagaacgcagugcucuucgaaguggccug

SEQ ID NO: 4201 - RNA, 32 nt, Artificial Sequence
  Synthetic
uggagaacgcagugcucuucgaaguggccugg

SEQ ID NO: 4202 - RNA, 32 nt, Artificial Sequence
  Synthetic
ggagaacgcagugcucuucgaaguggccuggg

SEQ ID NO: 4203 - RNA, 32 nt, Artificial Sequence
  Synthetic
gagaacgcagugcucuucgaaguggccuggga

SEQ ID NO: 4204 - RNA, 32 nt, Artificial Sequence
  Synthetic
agaacgcagugcucuucgaaguggccugggag

SEQ ID NO: 4205 - RNA, 32 nt, Artificial Sequence
  Synthetic
gaacgcagugcucuucgaaguggccugggagg

SEQ ID NO: 4206 - RNA, 32 nt, Artificial Sequence
  Synthetic
aacgcagugcucuucgaaguggccugggaggu

SEQ ID NO: 4207 - RNA, 32 nt, Artificial Sequence
  Synthetic
acgcagugcucuucgaaguggccugggaggug

SEQ ID NO: 4208 - RNA, 32 nt, Artificial Sequence
  Synthetic
cgcagugcucuucgaaguggccugggaggugg

SEQ ID NO: 4209 - RNA, 32 nt, Artificial Sequence
  Synthetic
gcagugcucuucgaaguggccugggagguggc

SEQ ID NO: 4210 - RNA, 32 nt, Artificial Sequence
  Synthetic
cagugcucuucgaaguggccugggagguggcu

SEQ ID NO: 4211 - RNA, 32 nt, Artificial Sequence
  Synthetic
agugcucuucgaaguggccugggagguggcua

SEQ ID NO: 4212 - RNA, 32 nt, Artificial Sequence
  Synthetic
gugcucuucgaaguggccugggagguggcuaa

SEQ ID NO: 4213 - RNA, 32 nt, Artificial Sequence
  Synthetic
ugcucuucgaaguggccugggagguggcuaac

SEQ ID NO: 4214 - RNA, 32 nt, Artificial Sequence
  Synthetic
gcucuucgaaguggccugggagguggcuaaca

SEQ ID NO: 4215 - RNA, 32 nt, Artificial Sequence
  Synthetic
cucuucgaaguggccugggagguggcuaacaa

SEQ ID NO: 4216 - RNA, 32 nt, Artificial Sequence
  Synthetic
ucuucgaaguggccugggagguggcuaacaag

SEQ ID NO: 4217 - RNA, 32 nt, Artificial Sequence
  Synthetic
cuucgaaguggccugggagguggcuaacaagg

SEQ ID NO: 4218 - RNA, 32 nt, Artificial Sequence
  Synthetic
uucgaaguggccugggagguggcuaacaaggu

SEQ ID NO: 4219 - RNA, 32 nt, Artificial Sequence
  Synthetic
ucgaaguggccugggagguggcuaacaaggug

SEQ ID NO: 4220 - RNA, 32 nt, Artificial Sequence
  Synthetic
cgaaguggccugggagguggcuaacaaggugg

SEQ ID NO: 4221 - RNA, 32 nt, Artificial Sequence
  Synthetic
gaaguggccugggagguggcuaacaagguggg

SEQ ID NO: 4222 - RNA, 32 nt, Artificial Sequence
  Synthetic
aaguggccugggagguggcuaacaaggugggu

SEQ ID NO: 4223 - RNA, 32 nt, Artificial Sequence
  Synthetic
aguggccugggagguggcuaacaaggugggug

SEQ ID NO: 4224 - RNA, 32 nt, Artificial Sequence
  Synthetic
guggccugggagguggcuaacaaggugggugg

SEQ ID NO: 4225 - RNA, 32 nt, Artificial Sequence
  Synthetic
uggccugggagguggcuaacaagguggguggc

SEQ ID NO: 4226 - RNA, 32 nt, Artificial Sequence
  Synthetic
ggccugggagguggcuaacaagguggguggca

SEQ ID NO: 4227 - RNA, 32 nt, Artificial Sequence
  Synthetic
gccugggagguggcuaacaagguggguggcau

SEQ ID NO: 4228 - RNA, 32 nt, Artificial Sequence
  Synthetic
ccugggagguggcuaacaagguggguggcauc

SEQ ID NO: 4229 - RNA, 32 nt, Artificial Sequence
  Synthetic
cugggagguggcuaacaagguggguggcaucu

SEQ ID NO: 4230 - RNA, 32 nt, Artificial Sequence
  Synthetic
ugggagguggcuaacaagguggguggcaucua

SEQ ID NO: 4231 - RNA, 32 nt, Artificial Sequence
  Synthetic
gggagguggcuaacaagguggguggcaucuac

SEQ ID NO: 4232 - RNA, 32 nt, Artificial Sequence
  Synthetic
ggagguggcuaacaagguggguggcaucuaca

SEQ ID NO: 4233 - RNA, 32 nt, Artificial Sequence
  Synthetic
gagguggcuaacaagguggguggcaucuacac

SEQ ID NO: 4234 - RNA, 32 nt, Artificial Sequence
  Synthetic
agguggcuaacaagguggguggcaucuacacg

SEQ ID NO: 4235 - RNA, 32 nt, Artificial Sequence
  Synthetic
gguggcuaacaagguggguggcaucuacacgg

SEQ ID NO: 4236 - RNA, 32 nt, Artificial Sequence
  Synthetic
guggcuaacaagguggguggcaucuacacggu

SEQ ID NO: 4237 - RNA, 32 nt, Artificial Sequence
  Synthetic
uggcuaacaagguggguggcaucuacacggug

SEQ ID NO: 4238 - RNA, 32 nt, Artificial Sequence
  Synthetic
ggcuaacaagguggguggcaucuacacggugc

SEQ ID NO: 4239 - RNA, 32 nt, Artificial Sequence
  Synthetic
gcuaacaagguggguggcaucuacacggugcu

SEQ ID NO: 4240 - RNA, 32 nt, Artificial Sequence
  Synthetic
cuaacaagguggguggcaucuacacggugcug

SEQ ID NO: 4241 - RNA, 32 nt, Artificial Sequence
  Synthetic
uaacaagguggguggcaucuacacggugcugc

SEQ ID NO: 4242 - RNA, 32 nt, Artificial Sequence
  Synthetic
aacaagguggguggcaucuacacggugcugca

SEQ ID NO: 4243 - RNA, 32 nt, Artificial Sequence
  Synthetic
acaagguggguggcaucuacacggugcugcag

SEQ ID NO: 4244 - RNA, 32 nt, Artificial Sequence
  Synthetic
caagguggguggcaucuacacggugcugcaga

SEQ ID NO: 4245 - RNA, 32 nt, Artificial Sequence
  Synthetic
aagguggguggcaucuacacggugcugcagac

SEQ ID NO: 4246 - RNA, 32 nt, Artificial Sequence
  Synthetic
agguggguggcaucuacacggugcugcagacg

SEQ ID NO: 4247 - RNA, 32 nt, Artificial Sequence
  Synthetic
gguggguggcaucuacacggugcugcagacga

SEQ ID NO: 4248 - RNA, 32 nt, Artificial Sequence
  Synthetic
guggguggcaucuacacggugcugcagacgaa

SEQ ID NO: 4249 - RNA, 32 nt, Artificial Sequence
  Synthetic
uggguggcaucuacacggugcugcagacgaag

SEQ ID NO: 4250 - RNA, 32 nt, Artificial Sequence
  Synthetic
ggguggcaucuacacggugcugcagacgaagg

SEQ ID NO: 4251 - RNA, 32 nt, Artificial Sequence
  Synthetic
gguggcaucuacacggugcugcagacgaaggc

SEQ ID NO: 4252 - RNA, 32 nt, Artificial Sequence
  Synthetic
guggcaucuacacggugcugcagacgaaggcg

SEQ ID NO: 4253 - RNA, 32 nt, Artificial Sequence
  Synthetic
uggcaucuacacggugcugcagacgaaggcga

SEQ ID NO: 4254 - RNA, 32 nt, Artificial Sequence
  Synthetic
ggcaucuacacggugcugcagacgaaggcgaa

SEQ ID NO: 4255 - RNA, 32 nt, Artificial Sequence
  Synthetic
gcaucuacacggugcugcagacgaaggcgaag

SEQ ID NO: 4256 - RNA, 32 nt, Artificial Sequence
  Synthetic
caucuacacggugcugcagacgaaggcgaagg

SEQ ID NO: 4257 - RNA, 32 nt, Artificial Sequence
  Synthetic
aucuacacggugcugcagacgaaggcgaaggu

SEQ ID NO: 4258 - RNA, 32 nt, Artificial Sequence
  Synthetic
ucuacacggugcugcagacgaaggcgaaggug

SEQ ID NO: 4259 - RNA, 32 nt, Artificial Sequence
  Synthetic
cuacacggugcugcagacgaaggcgaagguga

SEQ ID NO: 4260 - RNA, 32 nt, Artificial Sequence
  Synthetic
uacacggugcugcagacgaaggcgaaggugac

SEQ ID NO: 4261 - RNA, 32 nt, Artificial Sequence
  Synthetic
acacggugcugcagacgaaggcgaaggugaca

SEQ ID NO: 4262 - RNA, 32 nt, Artificial Sequence
  Synthetic
cacggugcugcagacgaaggcgaaggugacag

SEQ ID NO: 4263 - RNA, 32 nt, Artificial Sequence
  Synthetic
acggugcugcagacgaaggcgaaggugacagg

SEQ ID NO: 4264 - RNA, 32 nt, Artificial Sequence
  Synthetic
cggugcugcagacgaaggcgaaggugacaggg

SEQ ID NO: 4265 - RNA, 32 nt, Artificial Sequence
  Synthetic
ggugcugcagacgaaggcgaaggugacagggg

SEQ ID NO: 4266 - RNA, 32 nt, Artificial Sequence
  Synthetic
gugcugcagacgaaggcgaaggugacagggga

SEQ ID NO: 4267 - RNA, 32 nt, Artificial Sequence
  Synthetic
ugcugcagacgaaggcgaaggugacaggggac

SEQ ID NO: 4268 - RNA, 32 nt, Artificial Sequence
  Synthetic
gcugcagacgaaggcgaaggugacaggggacg

SEQ ID NO: 4269 - RNA, 32 nt, Artificial Sequence
  Synthetic
cugcagacgaaggcgaaggugacaggggacga

SEQ ID NO: 4270 - RNA, 32 nt, Artificial Sequence
  Synthetic
ugcagacgaaggcgaaggugacaggggacgaa

SEQ ID NO: 4271 - RNA, 32 nt, Artificial Sequence
  Synthetic
gcagacgaaggcgaaggugacaggggacgaau

SEQ ID NO: 4272 - RNA, 32 nt, Artificial Sequence
  Synthetic
cagacgaaggcgaaggugacaggggacgaaug

SEQ ID NO: 4273 - RNA, 32 nt, Artificial Sequence
  Synthetic
agacgaaggcgaaggugacaggggacgaaugg

SEQ ID NO: 4274 - RNA, 32 nt, Artificial Sequence
  Synthetic
gacgaaggcgaaggugacaggggacgaauggg

SEQ ID NO: 4275 - RNA, 32 nt, Artificial Sequence
  Synthetic
acgaaggcgaaggugacaggggacgaaugggg

SEQ ID NO: 4276 - RNA, 32 nt, Artificial Sequence
  Synthetic
cgaaggcgaaggugacaggggacgaauggggc

SEQ ID NO: 4277 - RNA, 32 nt, Artificial Sequence
  Synthetic
gaaggcgaaggugacaggggacgaauggggcg

SEQ ID NO: 4278 - RNA, 32 nt, Artificial Sequence
  Synthetic
aaggcgaaggugacaggggacgaauggggcga

SEQ ID NO: 4279 - RNA, 32 nt, Artificial Sequence
  Synthetic
aggcgaaggugacaggggacgaauggggcgac

SEQ ID NO: 4280 - RNA, 32 nt, Artificial Sequence
  Synthetic
ggcgaaggugacaggggacgaauggggcgaca

SEQ ID NO: 4281 - RNA, 32 nt, Artificial Sequence
  Synthetic
gcgaaggugacaggggacgaauggggcgacaa

SEQ ID NO: 4282 - RNA, 32 nt, Artificial Sequence
  Synthetic
cgaaggugacaggggacgaauggggcgacaac

SEQ ID NO: 4283 - RNA, 32 nt, Artificial Sequence
  Synthetic
gaaggugacaggggacgaauggggcgacaacu

SEQ ID NO: 4284 - RNA, 32 nt, Artificial Sequence
  Synthetic
aaggugacaggggacgaauggggcgacaacua

SEQ ID NO: 4285 - RNA, 32 nt, Artificial Sequence
  Synthetic
aggugacaggggacgaauggggcgacaacuac

SEQ ID NO: 4286 - RNA, 32 nt, Artificial Sequence
  Synthetic
ggugacaggggacgaauggggcgacaacuacu

SEQ ID NO: 4287 - RNA, 32 nt, Artificial Sequence
  Synthetic
gugacaggggacgaauggggcgacaacuacuu

SEQ ID NO: 4288 - RNA, 32 nt, Artificial Sequence
  Synthetic
ugacaggggacgaauggggcgacaacuacuuc

SEQ ID NO: 4289 - RNA, 32 nt, Artificial Sequence
  Synthetic
gacaggggacgaauggggcgacaacuacuucc

SEQ ID NO: 4290 - RNA, 32 nt, Artificial Sequence
  Synthetic
acaggggacgaauggggcgacaacuacuuccu

SEQ ID NO: 4291 - RNA, 32 nt, Artificial Sequence
  Synthetic
caggggacgaauggggcgacaacuacuuccug

SEQ ID NO: 4292 - RNA, 32 nt, Artificial Sequence
  Synthetic
aggggacgaauggggcgacaacuacuuccugg

SEQ ID NO: 4293 - RNA, 32 nt, Artificial Sequence
  Synthetic
ggggacgaauggggcgacaacuacuuccuggu

SEQ ID NO: 4294 - RNA, 32 nt, Artificial Sequence
  Synthetic
gggacgaauggggcgacaacuacuuccuggug

SEQ ID NO: 4295 - RNA, 32 nt, Artificial Sequence
  Synthetic
ggacgaauggggcgacaacuacuuccuggugg

SEQ ID NO: 4296 - RNA, 32 nt, Artificial Sequence
  Synthetic
gacgaauggggcgacaacuacuuccugguggg

SEQ ID NO: 4297 - RNA, 32 nt, Artificial Sequence
  Synthetic
acgaauggggcgacaacuacuuccuggugggg

SEQ ID NO: 4298 - RNA, 32 nt, Artificial Sequence
  Synthetic
cgaauggggcgacaacuacuuccugguggggc

SEQ ID NO: 4299 - RNA, 32 nt, Artificial Sequence
  Synthetic
gaauggggcgacaacuacuuccugguggggcc

SEQ ID NO: 4300 - RNA, 32 nt, Artificial Sequence
  Synthetic
aauggggcgacaacuacuuccugguggggccg

SEQ ID NO: 4301 - RNA, 32 nt, Artificial Sequence
  Synthetic
auggggcgacaacuacuuccugguggggccgu

SEQ ID NO: 4302 - RNA, 32 nt, Artificial Sequence
  Synthetic
uggggcgacaacuacuuccugguggggccgua

SEQ ID NO: 4303 - RNA, 32 nt, Artificial Sequence
  Synthetic
ggggcgacaacuacuuccugguggggccguac

SEQ ID NO: 4304 - RNA, 32 nt, Artificial Sequence
  Synthetic
gggcgacaacuacuuccugguggggccguaca

SEQ ID NO: 4305 - RNA, 32 nt, Artificial Sequence
  Synthetic
ggcgacaacuacuuccugguggggccguacac

SEQ ID NO: 4306 - RNA, 32 nt, Artificial Sequence
  Synthetic
gcgacaacuacuuccugguggggccguacacg

SEQ ID NO: 4307 - RNA, 32 nt, Artificial Sequence
  Synthetic
cgacaacuacuuccugguggggccguacacgg

SEQ ID NO: 4308 - RNA, 32 nt, Artificial Sequence
  Synthetic
gacaacuacuuccugguggggccguacacgga

SEQ ID NO: 4309 - RNA, 32 nt, Artificial Sequence
  Synthetic
acaacuacuuccugguggggccguacacggag

SEQ ID NO: 4310 - RNA, 32 nt, Artificial Sequence
  Synthetic
caacuacuuccugguggggccguacacggagc

SEQ ID NO: 4311 - RNA, 32 nt, Artificial Sequence
  Synthetic
aacuacuuccugguggggccguacacggagca

SEQ ID NO: 4312 - RNA, 32 nt, Artificial Sequence
  Synthetic
acuacuuccugguggggccguacacggagcag

SEQ ID NO: 4313 - RNA, 32 nt, Artificial Sequence
  Synthetic
cuacuuccugguggggccguacacggagcagg

SEQ ID NO: 4314 - RNA, 32 nt, Artificial Sequence
  Synthetic
uacuuccugguggggccguacacggagcaggg

SEQ ID NO: 4315 - RNA, 32 nt, Artificial Sequence
  Synthetic
acuuccugguggggccguacacggagcagggc

SEQ ID NO: 4316 - RNA, 32 nt, Artificial Sequence
  Synthetic
cuuccugguggggccguacacggagcagggcg

SEQ ID NO: 4317 - RNA, 32 nt, Artificial Sequence
  Synthetic
uuccugguggggccguacacggagcagggcgu

SEQ ID NO: 4318 - RNA, 32 nt, Artificial Sequence
  Synthetic
uccugguggggccguacacggagcagggcgug

SEQ ID NO: 4319 - RNA, 32 nt, Artificial Sequence
  Synthetic
ccugguggggccguacacggagcagggcguga

SEQ ID NO: 4320 - RNA, 32 nt, Artificial Sequence
  Synthetic
cugguggggccguacacggagcagggcgugag

SEQ ID NO: 4321 - RNA, 32 nt, Artificial Sequence
  Synthetic
ugguggggccguacacggagcagggcgugagg

SEQ ID NO: 4322 - RNA, 32 nt, Artificial Sequence
  Synthetic
gguggggccguacacggagcagggcgugagga

SEQ ID NO: 4323 - RNA, 32 nt, Artificial Sequence
  Synthetic
guggggccguacacggagcagggcgugaggac

SEQ ID NO: 4324 - RNA, 32 nt, Artificial Sequence
  Synthetic
uggggccguacacggagcagggcgugaggacc

SEQ ID NO: 4325 - RNA, 32 nt, Artificial Sequence
  Synthetic
ggggccguacacggagcagggcgugaggaccc

SEQ ID NO: 4326 - RNA, 32 nt, Artificial Sequence
  Synthetic
gggccguacacggagcagggcgugaggaccca

SEQ ID NO: 4327 - RNA, 32 nt, Artificial Sequence
  Synthetic
ggccguacacggagcagggcgugaggacccag

SEQ ID NO: 4328 - RNA, 32 nt, Artificial Sequence
  Synthetic
gccguacacggagcagggcgugaggacccagg

SEQ ID NO: 4329 - RNA, 32 nt, Artificial Sequence
  Synthetic
ccguacacggagcagggcgugaggacccaggu

SEQ ID NO: 4330 - RNA, 32 nt, Artificial Sequence
  Synthetic
cguacacggagcagggcgugaggacccaggug

SEQ ID NO: 4331 - RNA, 32 nt, Artificial Sequence
  Synthetic
guacacggagcagggcgugaggacccaggugg

SEQ ID NO: 4332 - RNA, 32 nt, Artificial Sequence
  Synthetic
uacacggagcagggcgugaggacccaggugga

SEQ ID NO: 4333 - RNA, 32 nt, Artificial Sequence
  Synthetic
acacggagcagggcgugaggacccagguggaa

SEQ ID NO: 4334 - RNA, 32 nt, Artificial Sequence
  Synthetic
cacggagcagggcgugaggacccagguggaac

SEQ ID NO: 4335 - RNA, 32 nt, Artificial Sequence
  Synthetic
acggagcagggcgugaggacccagguggaacu

SEQ ID NO: 4336 - RNA, 32 nt, Artificial Sequence
  Synthetic
cggagcagggcgugaggacccagguggaacug

SEQ ID NO: 4337 - RNA, 32 nt, Artificial Sequence
  Synthetic
ggagcagggcgugaggacccagguggaacugc

SEQ ID NO: 4338 - RNA, 32 nt, Artificial Sequence
  Synthetic
gagcagggcgugaggacccagguggaacugcu

SEQ ID NO: 4339 - RNA, 32 nt, Artificial Sequence
  Synthetic
agcagggcgugaggacccagguggaacugcug

SEQ ID NO: 4340 - RNA, 32 nt, Artificial Sequence
  Synthetic
gcagggcgugaggacccagguggaacugcugg

SEQ ID NO: 4341 - RNA, 32 nt, Artificial Sequence
  Synthetic
cagggcgugaggacccagguggaacugcugga

SEQ ID NO: 4342 - RNA, 32 nt, Artificial Sequence
  Synthetic
agggcgugaggacccagguggaacugcuggag

SEQ ID NO: 4343 - RNA, 32 nt, Artificial Sequence
  Synthetic
gggcgugaggacccagguggaacugcuggagg

SEQ ID NO: 4344 - RNA, 32 nt, Artificial Sequence
  Synthetic
ggcgugaggacccagguggaacugcuggaggc

SEQ ID NO: 4345 - RNA, 32 nt, Artificial Sequence
  Synthetic
gcgugaggacccagguggaacugcuggaggcc

SEQ ID NO: 4346 - RNA, 32 nt, Artificial Sequence
  Synthetic
cgugaggacccagguggaacugcuggaggccc

SEQ ID NO: 4347 - RNA, 32 nt, Artificial Sequence
  Synthetic
gugaggacccagguggaacugcuggaggcccc

SEQ ID NO: 4348 - RNA, 32 nt, Artificial Sequence
  Synthetic
ugaggacccagguggaacugcuggaggccccc

SEQ ID NO: 4349 - RNA, 32 nt, Artificial Sequence
  Synthetic
gaggacccagguggaacugcuggaggccccca

SEQ ID NO: 4350 - RNA, 32 nt, Artificial Sequence
  Synthetic
aggacccagguggaacugcuggaggcccccac

SEQ ID NO: 4351 - RNA, 32 nt, Artificial Sequence
  Synthetic
ggacccagguggaacugcuggaggcccccacc

SEQ ID NO: 4352 - RNA, 32 nt, Artificial Sequence
  Synthetic
gacccagguggaacugcuggaggcccccaccc

SEQ ID NO: 4353 - RNA, 32 nt, Artificial Sequence
  Synthetic
acccagguggaacugcuggaggcccccacccc

SEQ ID NO: 4354 - RNA, 32 nt, Artificial Sequence
  Synthetic
cccagguggaacugcuggaggcccccaccccg

SEQ ID NO: 4355 - RNA, 32 nt, Artificial Sequence
  Synthetic
ccagguggaacugcuggaggcccccaccccgg

SEQ ID NO: 4356 - RNA, 32 nt, Artificial Sequence
  Synthetic
cagguggaacugcuggaggcccccaccccggc

SEQ ID NO: 4357 - RNA, 32 nt, Artificial Sequence
  Synthetic
agguggaacugcuggaggcccccaccccggcc

SEQ ID NO: 4358 - RNA, 32 nt, Artificial Sequence
  Synthetic
gguggaacugcuggaggcccccaccccggccc

SEQ ID NO: 4359 - RNA, 32 nt, Artificial Sequence
  Synthetic
guggaacugcuggaggcccccaccccggcccu

SEQ ID NO: 4360 - RNA, 32 nt, Artificial Sequence
  Synthetic
uggaacugcuggaggcccccaccccggcccug

SEQ ID NO: 4361 - RNA, 32 nt, Artificial Sequence
  Synthetic
ggaacugcuggaggcccccaccccggcccuga

SEQ ID NO: 4362 - RNA, 32 nt, Artificial Sequence
  Synthetic
gaacugcuggaggcccccaccccggcccugaa

SEQ ID NO: 4363 - RNA, 32 nt, Artificial Sequence
  Synthetic
aacugcuggaggcccccaccccggcccugaag

SEQ ID NO: 4364 - RNA, 32 nt, Artificial Sequence
  Synthetic
acugcuggaggcccccaccccggcccugaaga

SEQ ID NO: 4365 - RNA, 32 nt, Artificial Sequence
  Synthetic
cugcuggaggcccccaccccggcccugaagag

SEQ ID NO: 4366 - RNA, 32 nt, Artificial Sequence
  Synthetic
ugcuggaggcccccaccccggcccugaagagg

SEQ ID NO: 4367 - RNA, 32 nt, Artificial Sequence
  Synthetic
gcuggaggcccccaccccggcccugaagagga

SEQ ID NO: 4368 - RNA, 32 nt, Artificial Sequence
  Synthetic
cuggaggcccccaccccggcccugaagaggac

SEQ ID NO: 4369 - RNA, 32 nt, Artificial Sequence
  Synthetic
uggaggcccccaccccggcccugaagaggaca

SEQ ID NO: 4370 - RNA, 32 nt, Artificial Sequence
  Synthetic
ggaggcccccaccccggcccugaagaggacac

SEQ ID NO: 4371 - RNA, 32 nt, Artificial Sequence
  Synthetic
gaggcccccaccccggcccugaagaggacacu

SEQ ID NO: 4372 - RNA, 32 nt, Artificial Sequence
  Synthetic
aggcccccaccccggcccugaagaggacacug

SEQ ID NO: 4373 - RNA, 32 nt, Artificial Sequence
  Synthetic
ggcccccaccccggcccugaagaggacacugg

SEQ ID NO: 4374 - RNA, 32 nt, Artificial Sequence
  Synthetic
gcccccaccccggcccugaagaggacacugga

SEQ ID NO: 4375 - RNA, 32 nt, Artificial Sequence
  Synthetic
cccccaccccggcccugaagaggacacuggau

SEQ ID NO: 4376 - RNA, 32 nt, Artificial Sequence
  Synthetic
ccccaccccggcccugaagaggacacuggauu

SEQ ID NO: 4377 - RNA, 32 nt, Artificial Sequence
  Synthetic
cccaccccggcccugaagaggacacuggauuc

SEQ ID NO: 4378 - RNA, 32 nt, Artificial Sequence
  Synthetic
ccaccccggcccugaagaggacacuggauucc

SEQ ID NO: 4379 - RNA, 32 nt, Artificial Sequence
  Synthetic
caccccggcccugaagaggacacuggauucca

SEQ ID NO: 4380 - RNA, 32 nt, Artificial Sequence
  Synthetic
accccggcccugaagaggacacuggauuccau

SEQ ID NO: 4381 - RNA, 32 nt, Artificial Sequence
  Synthetic
ccccggcccugaagaggacacuggauuccaug

SEQ ID NO: 4382 - RNA, 32 nt, Artificial Sequence
  Synthetic
cccggcccugaagaggacacuggauuccauga

SEQ ID NO: 4383 - RNA, 32 nt, Artificial Sequence
  Synthetic
ccggcccugaagaggacacuggauuccaugaa

SEQ ID NO: 4384 - RNA, 32 nt, Artificial Sequence
  Synthetic
cggcccugaagaggacacuggauuccaugaac

SEQ ID NO: 4385 - RNA, 32 nt, Artificial Sequence
  Synthetic
ggcccugaagaggacacuggauuccaugaaca

SEQ ID NO: 4386 - RNA, 32 nt, Artificial Sequence
  Synthetic
gcccugaagaggacacuggauuccaugaacag

SEQ ID NO: 4387 - RNA, 32 nt, Artificial Sequence
  Synthetic
cccugaagaggacacuggauuccaugaacagc

SEQ ID NO: 4388 - RNA, 32 nt, Artificial Sequence
  Synthetic
ccugaagaggacacuggauuccaugaacagca

SEQ ID NO: 4389 - RNA, 32 nt, Artificial Sequence
  Synthetic
cugaagaggacacuggauuccaugaacagcaa

SEQ ID NO: 4390 - RNA, 32 nt, Artificial Sequence
  Synthetic
ugaagaggacacuggauuccaugaacagcaag

SEQ ID NO: 4391 - RNA, 32 nt, Artificial Sequence
  Synthetic
gaagaggacacuggauuccaugaacagcaagg

SEQ ID NO: 4392 - RNA, 32 nt, Artificial Sequence
  Synthetic
aagaggacacuggauuccaugaacagcaaggg

SEQ ID NO: 4393 - RNA, 32 nt, Artificial Sequence
  Synthetic
agaggacacuggauuccaugaacagcaagggc

SEQ ID NO: 4394 - RNA, 32 nt, Artificial Sequence
  Synthetic
gaggacacuggauuccaugaacagcaagggcu

SEQ ID NO: 4395 - RNA, 32 nt, Artificial Sequence
  Synthetic
aggacacuggauuccaugaacagcaagggcug

SEQ ID NO: 4396 - RNA, 32 nt, Artificial Sequence
  Synthetic
ggacacuggauuccaugaacagcaagggcugc

SEQ ID NO: 4397 - RNA, 32 nt, Artificial Sequence
  Synthetic
gacacuggauuccaugaacagcaagggcugca

SEQ ID NO: 4398 - RNA, 32 nt, Artificial Sequence
  Synthetic
acacuggauuccaugaacagcaagggcugcaa

SEQ ID NO: 4399 - RNA, 32 nt, Artificial Sequence
  Synthetic
cacuggauuccaugaacagcaagggcugcaag

SEQ ID NO: 4400 - RNA, 32 nt, Artificial Sequence
  Synthetic
acuggauuccaugaacagcaagggcugcaagg

SEQ ID NO: 4401 - RNA, 32 nt, Artificial Sequence
  Synthetic
cuggauuccaugaacagcaagggcugcaaggu

SEQ ID NO: 4402 - RNA, 32 nt, Artificial Sequence
  Synthetic
uggauuccaugaacagcaagggcugcaaggug

SEQ ID NO: 4403 - RNA, 32 nt, Artificial Sequence
  Synthetic
ggauuccaugaacagcaagggcugcaaggugu

SEQ ID NO: 4404 - RNA, 32 nt, Artificial Sequence
  Synthetic
gauuccaugaacagcaagggcugcaaggugua

SEQ ID NO: 4405 - RNA, 32 nt, Artificial Sequence
  Synthetic
auuccaugaacagcaagggcugcaagguguau

SEQ ID NO: 4406 - RNA, 32 nt, Artificial Sequence
  Synthetic
uuccaugaacagcaagggcugcaagguguauu

SEQ ID NO: 4407 - RNA, 32 nt, Artificial Sequence
  Synthetic
uccaugaacagcaagggcugcaagguguauuu

SEQ ID NO: 4408 - RNA, 32 nt, Artificial Sequence
  Synthetic
ccaugaacagcaagggcugcaagguguauuuc

SEQ ID NO: 4409 - RNA, 32 nt, Artificial Sequence
  Synthetic
caugaacagcaagggcugcaagguguauuucg

SEQ ID NO: 4410 - RNA, 32 nt, Artificial Sequence
  Synthetic
augaacagcaagggcugcaagguguauuucgg

SEQ ID NO: 4411 - RNA, 32 nt, Artificial Sequence
  Synthetic
ugaacagcaagggcugcaagguguauuucggg

SEQ ID NO: 4412 - RNA, 32 nt, Artificial Sequence
  Synthetic
gaacagcaagggcugcaagguguauuucgggc

SEQ ID NO: 4413 - RNA, 32 nt, Artificial Sequence
  Synthetic
aacagcaagggcugcaagguguauuucgggcg

SEQ ID NO: 4414 - RNA, 32 nt, Artificial Sequence
  Synthetic
acagcaagggcugcaagguguauuucgggcgc

SEQ ID NO: 4415 - RNA, 32 nt, Artificial Sequence
  Synthetic
cagcaagggcugcaagguguauuucgggcgcu

SEQ ID NO: 4416 - RNA, 32 nt, Artificial Sequence
  Synthetic
agcaagggcugcaagguguauuucgggcgcug

SEQ ID NO: 4417 - RNA, 32 nt, Artificial Sequence
  Synthetic
gcaagggcugcaagguguauuucgggcgcugg

SEQ ID NO: 4418 - RNA, 32 nt, Artificial Sequence
  Synthetic
caagggcugcaagguguauuucgggcgcuggc

SEQ ID NO: 4419 - RNA, 32 nt, Artificial Sequence
  Synthetic
aagggcugcaagguguauuucgggcgcuggcu

SEQ ID NO: 4420 - RNA, 32 nt, Artificial Sequence
  Synthetic
agggcugcaagguguauuucgggcgcuggcug

SEQ ID NO: 4421 - RNA, 32 nt, Artificial Sequence
  Synthetic
gggcugcaagguguauuucgggcgcuggcuga

SEQ ID NO: 4422 - RNA, 32 nt, Artificial Sequence
  Synthetic
ggcugcaagguguauuucgggcgcuggcugau

SEQ ID NO: 4423 - RNA, 32 nt, Artificial Sequence
  Synthetic
gcugcaagguguauuucgggcgcuggcugauc

SEQ ID NO: 4424 - RNA, 32 nt, Artificial Sequence
  Synthetic
cugcaagguguauuucgggcgcuggcugaucg

SEQ ID NO: 4425 - RNA, 32 nt, Artificial Sequence
  Synthetic
ugcaagguguauuucgggcgcuggcugaucga

SEQ ID NO: 4426 - RNA, 32 nt, Artificial Sequence
  Synthetic
gcaagguguauuucgggcgcuggcugaucgag

SEQ ID NO: 4427 - RNA, 32 nt, Artificial Sequence
  Synthetic
caagguguauuucgggcgcuggcugaucgagg

SEQ ID NO: 4428 - RNA, 32 nt, Artificial Sequence
  Synthetic
aagguguauuucgggcgcuggcugaucgaggg

SEQ ID NO: 4429 - RNA, 32 nt, Artificial Sequence
  Synthetic
agguguauuucgggcgcuggcugaucgaggga

SEQ ID NO: 4430 - RNA, 32 nt, Artificial Sequence
  Synthetic
gguguauuucgggcgcuggcugaucgagggag

SEQ ID NO: 4431 - RNA, 32 nt, Artificial Sequence
  Synthetic
guguauuucgggcgcuggcugaucgagggagg

SEQ ID NO: 4432 - RNA, 32 nt, Artificial Sequence
  Synthetic
uguauuucgggcgcuggcugaucgagggaggc

SEQ ID NO: 4433 - RNA, 32 nt, Artificial Sequence
  Synthetic
guauuucgggcgcuggcugaucgagggaggcc

SEQ ID NO: 4434 - RNA, 32 nt, Artificial Sequence
  Synthetic
uauuucgggcgcuggcugaucgagggaggccc

SEQ ID NO: 4435 - RNA, 32 nt, Artificial Sequence
  Synthetic
auuucgggcgcuggcugaucgagggaggcccu

SEQ ID NO: 4436 - RNA, 32 nt, Artificial Sequence
  Synthetic
uuucgggcgcuggcugaucgagggaggcccuc

SEQ ID NO: 4437 - RNA, 32 nt, Artificial Sequence
  Synthetic
uucgggcgcuggcugaucgagggaggcccucu

SEQ ID NO: 4438 - RNA, 32 nt, Artificial Sequence
  Synthetic
ucgggcgcuggcugaucgagggaggcccucug

SEQ ID NO: 4439 - RNA, 32 nt, Artificial Sequence
  Synthetic
cgggcgcuggcugaucgagggaggcccucugg

SEQ ID NO: 4440 - RNA, 32 nt, Artificial Sequence
  Synthetic
gggcgcuggcugaucgagggaggcccucuggu

SEQ ID NO: 4441 - RNA, 32 nt, Artificial Sequence
  Synthetic
ggcgcuggcugaucgagggaggcccucuggug

SEQ ID NO: 4442 - RNA, 32 nt, Artificial Sequence
  Synthetic
gcgcuggcugaucgagggaggcccucuggugg

SEQ ID NO: 4443 - RNA, 32 nt, Artificial Sequence
  Synthetic
cgcuggcugaucgagggaggcccucugguggu

SEQ ID NO: 4444 - RNA, 32 nt, Artificial Sequence
  Synthetic
gcuggcugaucgagggaggcccucugguggug

SEQ ID NO: 4445 - RNA, 32 nt, Artificial Sequence
  Synthetic
cuggcugaucgagggaggcccucugguggugc

SEQ ID NO: 4446 - RNA, 32 nt, Artificial Sequence
  Synthetic
uggcugaucgagggaggcccucugguggugcu

SEQ ID NO: 4447 - RNA, 32 nt, Artificial Sequence
  Synthetic
ggcugaucgagggaggcccucugguggugcuc

SEQ ID NO: 4448 - RNA, 32 nt, Artificial Sequence
  Synthetic
gcugaucgagggaggcccucugguggugcucc

SEQ ID NO: 4449 - RNA, 32 nt, Artificial Sequence
  Synthetic
cugaucgagggaggcccucugguggugcuccu

SEQ ID NO: 4450 - RNA, 32 nt, Artificial Sequence
  Synthetic
ugaucgagggaggcccucugguggugcuccug

SEQ ID NO: 4451 - RNA, 32 nt, Artificial Sequence
  Synthetic
gaucgagggaggcccucugguggugcuccugg

SEQ ID NO: 4452 - RNA, 32 nt, Artificial Sequence
  Synthetic
aucgagggaggcccucugguggugcuccugga

SEQ ID NO: 4453 - RNA, 32 nt, Artificial Sequence
  Synthetic
ucgagggaggcccucugguggugcuccuggac

SEQ ID NO: 4454 - RNA, 32 nt, Artificial Sequence
  Synthetic
cgagggaggcccucugguggugcuccuggacg

SEQ ID NO: 4455 - RNA, 32 nt, Artificial Sequence
  Synthetic
gagggaggcccucugguggugcuccuggacgu

SEQ ID NO: 4456 - RNA, 32 nt, Artificial Sequence
  Synthetic
agggaggcccucugguggugcuccuggacgug

SEQ ID NO: 4457 - RNA, 32 nt, Artificial Sequence
  Synthetic
gggaggcccucugguggugcuccuggacgugg

SEQ ID NO: 4458 - RNA, 32 nt, Artificial Sequence
  Synthetic
ggaggcccucugguggugcuccuggacguggg

SEQ ID NO: 4459 - RNA, 32 nt, Artificial Sequence
  Synthetic
gaggcccucugguggugcuccuggacgugggu

SEQ ID NO: 4460 - RNA, 32 nt, Artificial Sequence
  Synthetic
aggcccucugguggugcuccuggacgugggug

SEQ ID NO: 4461 - RNA, 32 nt, Artificial Sequence
  Synthetic
ggcccucugguggugcuccuggacgugggugc

SEQ ID NO: 4462 - RNA, 32 nt, Artificial Sequence
  Synthetic
gcccucugguggugcuccuggacgugggugcc

SEQ ID NO: 4463 - RNA, 32 nt, Artificial Sequence
  Synthetic
cccucugguggugcuccuggacgugggugccu

SEQ ID NO: 4464 - RNA, 32 nt, Artificial Sequence
  Synthetic
ccucugguggugcuccuggacgugggugccuc

SEQ ID NO: 4465 - RNA, 32 nt, Artificial Sequence
  Synthetic
cucugguggugcuccuggacgugggugccuca

SEQ ID NO: 4466 - RNA, 32 nt, Artificial Sequence
  Synthetic
ucugguggugcuccuggacgugggugccucag

SEQ ID NO: 4467 - RNA, 32 nt, Artificial Sequence
  Synthetic
cugguggugcuccuggacgugggugccucagc

SEQ ID NO: 4468 - RNA, 32 nt, Artificial Sequence
  Synthetic
ugguggugcuccuggacgugggugccucagcu

SEQ ID NO: 4469 - RNA, 32 nt, Artificial Sequence
  Synthetic
gguggugcuccuggacgugggugccucagcuu

SEQ ID NO: 4470 - RNA, 32 nt, Artificial Sequence
  Synthetic
guggugcuccuggacgugggugccucagcuug

SEQ ID NO: 4471 - RNA, 32 nt, Artificial Sequence
  Synthetic
uggugcuccuggacgugggugccucagcuugg

SEQ ID NO: 4472 - RNA, 32 nt, Artificial Sequence
  Synthetic
ggugcuccuggacgugggugccucagcuuggg

SEQ ID NO: 4473 - RNA, 32 nt, Artificial Sequence
  Synthetic
gugcuccuggacgugggugccucagcuugggc

SEQ ID NO: 4474 - RNA, 32 nt, Artificial Sequence
  Synthetic
ugcuccuggacgugggugccucagcuugggcc

SEQ ID NO: 4475 - RNA, 32 nt, Artificial Sequence
  Synthetic
gcuccuggacgugggugccucagcuugggccc

SEQ ID NO: 4476 - RNA, 32 nt, Artificial Sequence
  Synthetic
cuccuggacgugggugccucagcuugggcccu

SEQ ID NO: 4477 - RNA, 32 nt, Artificial Sequence
  Synthetic
uccuggacgugggugccucagcuugggcccug

SEQ ID NO: 4478 - RNA, 32 nt, Artificial Sequence
  Synthetic
ccuggacgugggugccucagcuugggcccugg

SEQ ID NO: 4479 - RNA, 32 nt, Artificial Sequence
  Synthetic
cuggacgugggugccucagcuugggcccugga

SEQ ID NO: 4480 - RNA, 32 nt, Artificial Sequence
  Synthetic
uggacgugggugccucagcuugggcccuggag

SEQ ID NO: 4481 - RNA, 32 nt, Artificial Sequence
  Synthetic
ggacgugggugccucagcuugggcccuggagc

SEQ ID NO: 4482 - RNA, 32 nt, Artificial Sequence
  Synthetic
gacgugggugccucagcuugggcccuggagcg

SEQ ID NO: 4483 - RNA, 32 nt, Artificial Sequence
  Synthetic
acgugggugccucagcuugggcccuggagcgc

SEQ ID NO: 4484 - RNA, 32 nt, Artificial Sequence
  Synthetic
cgugggugccucagcuugggcccuggagcgcu

SEQ ID NO: 4485 - RNA, 32 nt, Artificial Sequence
  Synthetic
gugggugccucagcuugggcccuggagcgcug

SEQ ID NO: 4486 - RNA, 32 nt, Artificial Sequence
  Synthetic
ugggugccucagcuugggcccuggagcgcugg

SEQ ID NO: 4487 - RNA, 32 nt, Artificial Sequence
  Synthetic
gggugccucagcuugggcccuggagcgcugga

SEQ ID NO: 4488 - RNA, 32 nt, Artificial Sequence
  Synthetic
ggugccucagcuugggcccuggagcgcuggaa

SEQ ID NO: 4489 - RNA, 32 nt, Artificial Sequence
  Synthetic
gugccucagcuugggcccuggagcgcuggaag

SEQ ID NO: 4490 - RNA, 32 nt, Artificial Sequence
  Synthetic
ugccucagcuugggcccuggagcgcuggaagg

SEQ ID NO: 4491 - RNA, 32 nt, Artificial Sequence
  Synthetic
gccucagcuugggcccuggagcgcuggaaggg

SEQ ID NO: 4492 - RNA, 32 nt, Artificial Sequence
  Synthetic
ccucagcuugggcccuggagcgcuggaaggga

SEQ ID NO: 4493 - RNA, 32 nt, Artificial Sequence
  Synthetic
cucagcuugggcccuggagcgcuggaagggag

SEQ ID NO: 4494 - RNA, 32 nt, Artificial Sequence
  Synthetic
ucagcuugggcccuggagcgcuggaagggaga

SEQ ID NO: 4495 - RNA, 32 nt, Artificial Sequence
  Synthetic
cagcuugggcccuggagcgcuggaagggagag

SEQ ID NO: 4496 - RNA, 32 nt, Artificial Sequence
  Synthetic
agcuugggcccuggagcgcuggaagggagagc

SEQ ID NO: 4497 - RNA, 32 nt, Artificial Sequence
  Synthetic
gcuugggcccuggagcgcuggaagggagagcu

SEQ ID NO: 4498 - RNA, 32 nt, Artificial Sequence
  Synthetic
cuugggcccuggagcgcuggaagggagagcuc

SEQ ID NO: 4499 - RNA, 32 nt, Artificial Sequence
  Synthetic
uugggcccuggagcgcuggaagggagagcucu

SEQ ID NO: 4500 - RNA, 32 nt, Artificial Sequence
  Synthetic
ugggcccuggagcgcuggaagggagagcucug

SEQ ID NO: 4501 - RNA, 32 nt, Artificial Sequence
  Synthetic
gggcccuggagcgcuggaagggagagcucugg

SEQ ID NO: 4502 - RNA, 32 nt, Artificial Sequence
  Synthetic
ggcccuggagcgcuggaagggagagcucuggg

SEQ ID NO: 4503 - RNA, 32 nt, Artificial Sequence
  Synthetic
gcccuggagcgcuggaagggagagcucuggga

SEQ ID NO: 4504 - RNA, 32 nt, Artificial Sequence
  Synthetic
cccuggagcgcuggaagggagagcucugggau

SEQ ID NO: 4505 - RNA, 32 nt, Artificial Sequence
  Synthetic
ccuggagcgcuggaagggagagcucugggaua

SEQ ID NO: 4506 - RNA, 32 nt, Artificial Sequence
  Synthetic
cuggagcgcuggaagggagagcucugggauac

SEQ ID NO: 4507 - RNA, 32 nt, Artificial Sequence
  Synthetic
uggagcgcuggaagggagagcucugggauacc

SEQ ID NO: 4508 - RNA, 32 nt, Artificial Sequence
  Synthetic
ggagcgcuggaagggagagcucugggauaccu

SEQ ID NO: 4509 - RNA, 32 nt, Artificial Sequence
  Synthetic
gagcgcuggaagggagagcucugggauaccug

SEQ ID NO: 4510 - RNA, 32 nt, Artificial Sequence
  Synthetic
agcgcuggaagggagagcucugggauaccugc

SEQ ID NO: 4511 - RNA, 32 nt, Artificial Sequence
  Synthetic
gcgcuggaagggagagcucugggauaccugca

SEQ ID NO: 4512 - RNA, 32 nt, Artificial Sequence
  Synthetic
cgcuggaagggagagcucugggauaccugcaa

SEQ ID NO: 4513 - RNA, 32 nt, Artificial Sequence
  Synthetic
gcuggaagggagagcucugggauaccugcaac

SEQ ID NO: 4514 - RNA, 32 nt, Artificial Sequence
  Synthetic
cuggaagggagagcucugggauaccugcaaca

SEQ ID NO: 4515 - RNA, 32 nt, Artificial Sequence
  Synthetic
uggaagggagagcucugggauaccugcaacau

SEQ ID NO: 4516 - RNA, 32 nt, Artificial Sequence
  Synthetic
ggaagggagagcucugggauaccugcaacauc

SEQ ID NO: 4517 - RNA, 32 nt, Artificial Sequence
  Synthetic
gaagggagagcucugggauaccugcaacaucg

SEQ ID NO: 4518 - RNA, 32 nt, Artificial Sequence
  Synthetic
aagggagagcucugggauaccugcaacaucgg

SEQ ID NO: 4519 - RNA, 32 nt, Artificial Sequence
  Synthetic
agggagagcucugggauaccugcaacaucgga

SEQ ID NO: 4520 - RNA, 32 nt, Artificial Sequence
  Synthetic
gggagagcucugggauaccugcaacaucggag

SEQ ID NO: 4521 - RNA, 32 nt, Artificial Sequence
  Synthetic
ggagagcucugggauaccugcaacaucggagu

SEQ ID NO: 4522 - RNA, 32 nt, Artificial Sequence
  Synthetic
gagagcucugggauaccugcaacaucggagug

SEQ ID NO: 4523 - RNA, 32 nt, Artificial Sequence
  Synthetic
agagcucugggauaccugcaacaucggagugc

SEQ ID NO: 4524 - RNA, 32 nt, Artificial Sequence
  Synthetic
gagcucugggauaccugcaacaucggagugcc

SEQ ID NO: 4525 - RNA, 32 nt, Artificial Sequence
  Synthetic
agcucugggauaccugcaacaucggagugccg

SEQ ID NO: 4526 - RNA, 32 nt, Artificial Sequence
  Synthetic
gcucugggauaccugcaacaucggagugccgu

SEQ ID NO: 4527 - RNA, 32 nt, Artificial Sequence
  Synthetic
cucugggauaccugcaacaucggagugccgug

SEQ ID NO: 4528 - RNA, 32 nt, Artificial Sequence
  Synthetic
ucugggauaccugcaacaucggagugccgugg

SEQ ID NO: 4529 - RNA, 32 nt, Artificial Sequence
  Synthetic
cugggauaccugcaacaucggagugccguggu

SEQ ID NO: 4530 - RNA, 32 nt, Artificial Sequence
  Synthetic
ugggauaccugcaacaucggagugccguggua

SEQ ID NO: 4531 - RNA, 32 nt, Artificial Sequence
  Synthetic
gggauaccugcaacaucggagugccgugguac

SEQ ID NO: 4532 - RNA, 32 nt, Artificial Sequence
  Synthetic
ggauaccugcaacaucggagugccgugguacg

SEQ ID NO: 4533 - RNA, 32 nt, Artificial Sequence
  Synthetic
gauaccugcaacaucggagugccgugguacga

SEQ ID NO: 4534 - RNA, 32 nt, Artificial Sequence
  Synthetic
auaccugcaacaucggagugccgugguacgac

SEQ ID NO: 4535 - RNA, 32 nt, Artificial Sequence
  Synthetic
uaccugcaacaucggagugccgugguacgacc

SEQ ID NO: 4536 - RNA, 32 nt, Artificial Sequence
  Synthetic
accugcaacaucggagugccgugguacgaccg

SEQ ID NO: 4537 - RNA, 32 nt, Artificial Sequence
  Synthetic
ccugcaacaucggagugccgugguacgaccgc

SEQ ID NO: 4538 - RNA, 32 nt, Artificial Sequence
  Synthetic
cugcaacaucggagugccgugguacgaccgcg

SEQ ID NO: 4539 - RNA, 32 nt, Artificial Sequence
  Synthetic
ugcaacaucggagugccgugguacgaccgcga

SEQ ID NO: 4540 - RNA, 32 nt, Artificial Sequence
  Synthetic
gcaacaucggagugccgugguacgaccgcgag

SEQ ID NO: 4541 - RNA, 32 nt, Artificial Sequence
  Synthetic
caacaucggagugccgugguacgaccgcgagg

SEQ ID NO: 4542 - RNA, 32 nt, Artificial Sequence
  Synthetic
aacaucggagugccgugguacgaccgcgaggc

SEQ ID NO: 4543 - RNA, 32 nt, Artificial Sequence
  Synthetic
acaucggagugccgugguacgaccgcgaggcc

SEQ ID NO: 4544 - RNA, 32 nt, Artificial Sequence
  Synthetic
caucggagugccgugguacgaccgcgaggcca

SEQ ID NO: 4545 - RNA, 32 nt, Artificial Sequence
  Synthetic
aucggagugccgugguacgaccgcgaggccaa

SEQ ID NO: 4546 - RNA, 32 nt, Artificial Sequence
  Synthetic
ucggagugccgugguacgaccgcgaggccaac

SEQ ID NO: 4547 - RNA, 32 nt, Artificial Sequence
  Synthetic
cggagugccgugguacgaccgcgaggccaacg

SEQ ID NO: 4548 - RNA, 32 nt, Artificial Sequence
  Synthetic
ggagugccgugguacgaccgcgaggccaacga

SEQ ID NO: 4549 - RNA, 32 nt, Artificial Sequence
  Synthetic
gagugccgugguacgaccgcgaggccaacgac

SEQ ID NO: 4550 - RNA, 32 nt, Artificial Sequence
  Synthetic
agugccgugguacgaccgcgaggccaacgacg

SEQ ID NO: 4551 - RNA, 32 nt, Artificial Sequence
  Synthetic
gugccgugguacgaccgcgaggccaacgacgc

SEQ ID NO: 4552 - RNA, 32 nt, Artificial Sequence
  Synthetic
ugccgugguacgaccgcgaggccaacgacgcu

SEQ ID NO: 4553 - RNA, 32 nt, Artificial Sequence
  Synthetic
gccgugguacgaccgcgaggccaacgacgcug

SEQ ID NO: 4554 - RNA, 32 nt, Artificial Sequence
  Synthetic
ccgugguacgaccgcgaggccaacgacgcugu

SEQ ID NO: 4555 - RNA, 32 nt, Artificial Sequence
  Synthetic
cgugguacgaccgcgaggccaacgacgcuguc

SEQ ID NO: 4556 - RNA, 32 nt, Artificial Sequence
  Synthetic
gugguacgaccgcgaggccaacgacgcugucc

SEQ ID NO: 4557 - RNA, 32 nt, Artificial Sequence
  Synthetic
ugguacgaccgcgaggccaacgacgcuguccu

SEQ ID NO: 4558 - RNA, 32 nt, Artificial Sequence
  Synthetic
gguacgaccgcgaggccaacgacgcuguccuc

SEQ ID NO: 4559 - RNA, 32 nt, Artificial Sequence
  Synthetic
guacgaccgcgaggccaacgacgcuguccucu

SEQ ID NO: 4560 - RNA, 32 nt, Artificial Sequence
  Synthetic
uacgaccgcgaggccaacgacgcuguccucuu

SEQ ID NO: 4561 - RNA, 32 nt, Artificial Sequence
  Synthetic
acgaccgcgaggccaacgacgcuguccucuuu

SEQ ID NO: 4562 - RNA, 32 nt, Artificial Sequence
  Synthetic
cgaccgcgaggccaacgacgcuguccucuuug

SEQ ID NO: 4563 - RNA, 32 nt, Artificial Sequence
  Synthetic
gaccgcgaggccaacgacgcuguccucuuugg

SEQ ID NO: 4564 - RNA, 32 nt, Artificial Sequence
  Synthetic
accgcgaggccaacgacgcuguccucuuuggc

SEQ ID NO: 4565 - RNA, 32 nt, Artificial Sequence
  Synthetic
ccgcgaggccaacgacgcuguccucuuuggcu

SEQ ID NO: 4566 - RNA, 32 nt, Artificial Sequence
  Synthetic
cgcgaggccaacgacgcuguccucuuuggcuu

SEQ ID NO: 4567 - RNA, 32 nt, Artificial Sequence
  Synthetic
gcgaggccaacgacgcuguccucuuuggcuuu

SEQ ID NO: 4568 - RNA, 32 nt, Artificial Sequence
  Synthetic
cgaggccaacgacgcuguccucuuuggcuuuc

SEQ ID NO: 4569 - RNA, 32 nt, Artificial Sequence
  Synthetic
gaggccaacgacgcuguccucuuuggcuuucu

SEQ ID NO: 4570 - RNA, 32 nt, Artificial Sequence
  Synthetic
aggccaacgacgcuguccucuuuggcuuucug

SEQ ID NO: 4571 - RNA, 32 nt, Artificial Sequence
  Synthetic
ggccaacgacgcuguccucuuuggcuuucuga

SEQ ID NO: 4572 - RNA, 32 nt, Artificial Sequence
  Synthetic
gccaacgacgcuguccucuuuggcuuucugac

SEQ ID NO: 4573 - RNA, 32 nt, Artificial Sequence
  Synthetic
ccaacgacgcuguccucuuuggcuuucugacc

SEQ ID NO: 4574 - RNA, 32 nt, Artificial Sequence
  Synthetic
caacgacgcuguccucuuuggcuuucugacca

SEQ ID NO: 4575 - RNA, 32 nt, Artificial Sequence
  Synthetic
aacgacgcuguccucuuuggcuuucugaccac

SEQ ID NO: 4576 - RNA, 32 nt, Artificial Sequence
  Synthetic
acgacgcuguccucuuuggcuuucugaccacc

SEQ ID NO: 4577 - RNA, 32 nt, Artificial Sequence
  Synthetic
cgacgcuguccucuuuggcuuucugaccaccu

SEQ ID NO: 4578 - RNA, 32 nt, Artificial Sequence
  Synthetic
gacgcuguccucuuuggcuuucugaccaccug

SEQ ID NO: 4579 - RNA, 32 nt, Artificial Sequence
  Synthetic
acgcuguccucuuuggcuuucugaccaccugg

SEQ ID NO: 4580 - RNA, 32 nt, Artificial Sequence
  Synthetic
cgcuguccucuuuggcuuucugaccaccuggu

SEQ ID NO: 4581 - RNA, 32 nt, Artificial Sequence
  Synthetic
gcuguccucuuuggcuuucugaccaccugguu

SEQ ID NO: 4582 - RNA, 32 nt, Artificial Sequence
  Synthetic
cuguccucuuuggcuuucugaccaccugguuc

SEQ ID NO: 4583 - RNA, 32 nt, Artificial Sequence
  Synthetic
uguccucuuuggcuuucugaccaccugguucc

SEQ ID NO: 4584 - RNA, 32 nt, Artificial Sequence
  Synthetic
guccucuuuggcuuucugaccaccugguuccu

SEQ ID NO: 4585 - RNA, 32 nt, Artificial Sequence
  Synthetic
uccucuuuggcuuucugaccaccugguuccug

SEQ ID NO: 4586 - RNA, 32 nt, Artificial Sequence
  Synthetic
ccucuuuggcuuucugaccaccugguuccugg

SEQ ID NO: 4587 - RNA, 32 nt, Artificial Sequence
  Synthetic
cucuuuggcuuucugaccaccugguuccuggg

SEQ ID NO: 4588 - RNA, 32 nt, Artificial Sequence
  Synthetic
ucuuuggcuuucugaccaccugguuccugggu

SEQ ID NO: 4589 - RNA, 32 nt, Artificial Sequence
  Synthetic
cuuuggcuuucugaccaccugguuccugggug

SEQ ID NO: 4590 - RNA, 32 nt, Artificial Sequence
  Synthetic
uuuggcuuucugaccaccugguuccuggguga

SEQ ID NO: 4591 - RNA, 32 nt, Artificial Sequence
  Synthetic
uuggcuuucugaccaccugguuccugggugag

SEQ ID NO: 4592 - RNA, 32 nt, Artificial Sequence
  Synthetic
uggcuuucugaccaccugguuccugggugagu

SEQ ID NO: 4593 - RNA, 32 nt, Artificial Sequence
  Synthetic
ggcuuucugaccaccugguuccugggugaguu

SEQ ID NO: 4594 - RNA, 32 nt, Artificial Sequence
  Synthetic
gcuuucugaccaccugguuccugggugaguuc

SEQ ID NO: 4595 - RNA, 32 nt, Artificial Sequence
  Synthetic
cuuucugaccaccugguuccugggugaguucc

SEQ ID NO: 4596 - RNA, 32 nt, Artificial Sequence
  Synthetic
uuucugaccaccugguuccugggugaguuccu

SEQ ID NO: 4597 - RNA, 32 nt, Artificial Sequence
  Synthetic
uucugaccaccugguuccugggugaguuccug

SEQ ID NO: 4598 - RNA, 32 nt, Artificial Sequence
  Synthetic
ucugaccaccugguuccugggugaguuccugg

SEQ ID NO: 4599 - RNA, 32 nt, Artificial Sequence
  Synthetic
cugaccaccugguuccugggugaguuccuggc

SEQ ID NO: 4600 - RNA, 32 nt, Artificial Sequence
  Synthetic
ugaccaccugguuccugggugaguuccuggca

SEQ ID NO: 4601 - RNA, 32 nt, Artificial Sequence
  Synthetic
gaccaccugguuccugggugaguuccuggcac

SEQ ID NO: 4602 - RNA, 32 nt, Artificial Sequence
  Synthetic
accaccugguuccugggugaguuccuggcaca

SEQ ID NO: 4603 - RNA, 32 nt, Artificial Sequence
  Synthetic
ccaccugguuccugggugaguuccuggcacag

SEQ ID NO: 4604 - RNA, 32 nt, Artificial Sequence
  Synthetic
caccugguuccugggugaguuccuggcacaga

SEQ ID NO: 4605 - RNA, 32 nt, Artificial Sequence
  Synthetic
accugguuccugggugaguuccuggcacagag

SEQ ID NO: 4606 - RNA, 32 nt, Artificial Sequence
  Synthetic
ccugguuccugggugaguuccuggcacagagu

SEQ ID NO: 4607 - RNA, 32 nt, Artificial Sequence
  Synthetic
cugguuccugggugaguuccuggcacagagug

SEQ ID NO: 4608 - RNA, 32 nt, Artificial Sequence
  Synthetic
ugguuccugggugaguuccuggcacagaguga

SEQ ID NO: 4609 - RNA, 32 nt, Artificial Sequence
  Synthetic
gguuccugggugaguuccuggcacagagugag

SEQ ID NO: 4610 - RNA, 32 nt, Artificial Sequence
  Synthetic
guuccugggugaguuccuggcacagagugagg

SEQ ID NO: 4611 - RNA, 32 nt, Artificial Sequence
  Synthetic
uuccugggugaguuccuggcacagagugagga

SEQ ID NO: 4612 - RNA, 32 nt, Artificial Sequence
  Synthetic
uccugggugaguuccuggcacagagugaggag

SEQ ID NO: 4613 - RNA, 32 nt, Artificial Sequence
  Synthetic
ccugggugaguuccuggcacagagugaggaga

SEQ ID NO: 4614 - RNA, 32 nt, Artificial Sequence
  Synthetic
cugggugaguuccuggcacagagugaggagaa

SEQ ID NO: 4615 - RNA, 32 nt, Artificial Sequence
  Synthetic
ugggugaguuccuggcacagagugaggagaag

SEQ ID NO: 4616 - RNA, 32 nt, Artificial Sequence
  Synthetic
gggugaguuccuggcacagagugaggagaagc

SEQ ID NO: 4617 - RNA, 32 nt, Artificial Sequence
  Synthetic
ggugaguuccuggcacagagugaggagaagcc

SEQ ID NO: 4618 - RNA, 32 nt, Artificial Sequence
  Synthetic
gugaguuccuggcacagagugaggagaagcca

SEQ ID NO: 4619 - RNA, 32 nt, Artificial Sequence
  Synthetic
ugaguuccuggcacagagugaggagaagccac

SEQ ID NO: 4620 - RNA, 32 nt, Artificial Sequence
  Synthetic
gaguuccuggcacagagugaggagaagccaca

SEQ ID NO: 4621 - RNA, 32 nt, Artificial Sequence
  Synthetic
aguuccuggcacagagugaggagaagccacau

SEQ ID NO: 4622 - RNA, 32 nt, Artificial Sequence
  Synthetic
guuccuggcacagagugaggagaagccacaug

SEQ ID NO: 4623 - RNA, 32 nt, Artificial Sequence
  Synthetic
uuccuggcacagagugaggagaagccacaugu

SEQ ID NO: 4624 - RNA, 32 nt, Artificial Sequence
  Synthetic
uccuggcacagagugaggagaagccacaugug

SEQ ID NO: 4625 - RNA, 32 nt, Artificial Sequence
  Synthetic
ccuggcacagagugaggagaagccacaugugg

SEQ ID NO: 4626 - RNA, 32 nt, Artificial Sequence
  Synthetic
cuggcacagagugaggagaagccacauguggu

SEQ ID NO: 4627 - RNA, 32 nt, Artificial Sequence
  Synthetic
uggcacagagugaggagaagccacaugugguu

SEQ ID NO: 4628 - RNA, 32 nt, Artificial Sequence
  Synthetic
ggcacagagugaggagaagccacaugugguug

SEQ ID NO: 4629 - RNA, 32 nt, Artificial Sequence
  Synthetic
gcacagagugaggagaagccacaugugguugc

SEQ ID NO: 4630 - RNA, 32 nt, Artificial Sequence
  Synthetic
cacagagugaggagaagccacaugugguugcu

SEQ ID NO: 4631 - RNA, 32 nt, Artificial Sequence
  Synthetic
acagagugaggagaagccacaugugguugcuc

SEQ ID NO: 4632 - RNA, 32 nt, Artificial Sequence
  Synthetic
cagagugaggagaagccacaugugguugcuca

SEQ ID NO: 4633 - RNA, 32 nt, Artificial Sequence
  Synthetic
agagugaggagaagccacaugugguugcucac

SEQ ID NO: 4634 - RNA, 32 nt, Artificial Sequence
  Synthetic
gagugaggagaagccacaugugguugcucacu

SEQ ID NO: 4635 - RNA, 32 nt, Artificial Sequence
  Synthetic
agugaggagaagccacaugugguugcucacuu

SEQ ID NO: 4636 - RNA, 32 nt, Artificial Sequence
  Synthetic
gugaggagaagccacaugugguugcucacuuc

SEQ ID NO: 4637 - RNA, 32 nt, Artificial Sequence
  Synthetic
ugaggagaagccacaugugguugcucacuucc

SEQ ID NO: 4638 - RNA, 32 nt, Artificial Sequence
  Synthetic
gaggagaagccacaugugguugcucacuucca

SEQ ID NO: 4639 - RNA, 32 nt, Artificial Sequence
  Synthetic
aggagaagccacaugugguugcucacuuccau

SEQ ID NO: 4640 - RNA, 32 nt, Artificial Sequence
  Synthetic
ggagaagccacaugugguugcucacuuccaug

SEQ ID NO: 4641 - RNA, 32 nt, Artificial Sequence
  Synthetic
gagaagccacaugugguugcucacuuccauga

SEQ ID NO: 4642 - RNA, 32 nt, Artificial Sequence
  Synthetic
agaagccacaugugguugcucacuuccaugag

SEQ ID NO: 4643 - RNA, 32 nt, Artificial Sequence
  Synthetic
gaagccacaugugguugcucacuuccaugagu

SEQ ID NO: 4644 - RNA, 32 nt, Artificial Sequence
  Synthetic
aagccacaugugguugcucacuuccaugagug

SEQ ID NO: 4645 - RNA, 32 nt, Artificial Sequence
  Synthetic
agccacaugugguugcucacuuccaugagugg

SEQ ID NO: 4646 - RNA, 32 nt, Artificial Sequence
  Synthetic
gccacaugugguugcucacuuccaugaguggu

SEQ ID NO: 4647 - RNA, 32 nt, Artificial Sequence
  Synthetic
ccacaugugguugcucacuuccaugagugguu

SEQ ID NO: 4648 - RNA, 32 nt, Artificial Sequence
  Synthetic
cacaugugguugcucacuuccaugagugguug

SEQ ID NO: 4649 - RNA, 32 nt, Artificial Sequence
  Synthetic
acaugugguugcucacuuccaugagugguugg

SEQ ID NO: 4650 - RNA, 32 nt, Artificial Sequence
  Synthetic
caugugguugcucacuuccaugagugguuggc

SEQ ID NO: 4651 - RNA, 32 nt, Artificial Sequence
  Synthetic
augugguugcucacuuccaugagugguuggca

SEQ ID NO: 4652 - RNA, 32 nt, Artificial Sequence
  Synthetic
ugugguugcucacuuccaugagugguuggcag

SEQ ID NO: 4653 - RNA, 32 nt, Artificial Sequence
  Synthetic
gugguugcucacuuccaugagugguuggcagg

SEQ ID NO: 4654 - RNA, 32 nt, Artificial Sequence
  Synthetic
ugguugcucacuuccaugagugguuggcaggc

SEQ ID NO: 4655 - RNA, 32 nt, Artificial Sequence
  Synthetic
gguugcucacuuccaugagugguuggcaggcg

SEQ ID NO: 4656 - RNA, 32 nt, Artificial Sequence
  Synthetic
guugcucacuuccaugagugguuggcaggcgu

SEQ ID NO: 4657 - RNA, 32 nt, Artificial Sequence
  Synthetic
uugcucacuuccaugagugguuggcaggcguu

SEQ ID NO: 4658 - RNA, 32 nt, Artificial Sequence
  Synthetic
ugcucacuuccaugagugguuggcaggcguug

SEQ ID NO: 4659 - RNA, 32 nt, Artificial Sequence
  Synthetic
gcucacuuccaugagugguuggcaggcguugg

SEQ ID NO: 4660 - RNA, 32 nt, Artificial Sequence
  Synthetic
cucacuuccaugagugguuggcaggcguugga

SEQ ID NO: 4661 - RNA, 32 nt, Artificial Sequence
  Synthetic
ucacuuccaugagugguuggcaggcguuggac

SEQ ID NO: 4662 - RNA, 32 nt, Artificial Sequence
  Synthetic
cacuuccaugagugguuggcaggcguuggacu

SEQ ID NO: 4663 - RNA, 32 nt, Artificial Sequence
  Synthetic
acuuccaugagugguuggcaggcguuggacuc

SEQ ID NO: 4664 - RNA, 32 nt, Artificial Sequence
  Synthetic
cuuccaugagugguuggcaggcguuggacucu

SEQ ID NO: 4665 - RNA, 32 nt, Artificial Sequence
  Synthetic
uuccaugagugguuggcaggcguuggacucug

SEQ ID NO: 4666 - RNA, 32 nt, Artificial Sequence
  Synthetic
uccaugagugguuggcaggcguuggacucugc

SEQ ID NO: 4667 - RNA, 32 nt, Artificial Sequence
  Synthetic
ccaugagugguuggcaggcguuggacucugcc

SEQ ID NO: 4668 - RNA, 32 nt, Artificial Sequence
  Synthetic
caugagugguuggcaggcguuggacucugccu

SEQ ID NO: 4669 - RNA, 32 nt, Artificial Sequence
  Synthetic
augagugguuggcaggcguuggacucugccug

SEQ ID NO: 4670 - RNA, 32 nt, Artificial Sequence
  Synthetic
ugagugguuggcaggcguuggacucugccugu

SEQ ID NO: 4671 - RNA, 32 nt, Artificial Sequence
  Synthetic
gagugguuggcaggcguuggacucugccugug

SEQ ID NO: 4672 - RNA, 32 nt, Artificial Sequence
  Synthetic
agugguuggcaggcguuggacucugccugugu

SEQ ID NO: 4673 - RNA, 32 nt, Artificial Sequence
  Synthetic
gugguuggcaggcguuggacucugccuguguc

SEQ ID NO: 4674 - RNA, 32 nt, Artificial Sequence
  Synthetic
ugguuggcaggcguuggacucugccugugucg

SEQ ID NO: 4675 - RNA, 32 nt, Artificial Sequence
  Synthetic
gguuggcaggcguuggacucugccugugucgu

SEQ ID NO: 4676 - RNA, 32 nt, Artificial Sequence
  Synthetic
guuggcaggcguuggacucugccugugucgug

SEQ ID NO: 4677 - RNA, 32 nt, Artificial Sequence
  Synthetic
uuggcaggcguuggacucugccugugucgugc

SEQ ID NO: 4678 - RNA, 32 nt, Artificial Sequence
  Synthetic
uggcaggcguuggacucugccugugucgugcc

SEQ ID NO: 4679 - RNA, 32 nt, Artificial Sequence
  Synthetic
ggcaggcguuggacucugccugugucgugccc

SEQ ID NO: 4680 - RNA, 32 nt, Artificial Sequence
  Synthetic
gcaggcguuggacucugccugugucgugcccg

SEQ ID NO: 4681 - RNA, 32 nt, Artificial Sequence
  Synthetic
caggcguuggacucugccugugucgugcccgg

SEQ ID NO: 4682 - RNA, 32 nt, Artificial Sequence
  Synthetic
aggcguuggacucugccugugucgugcccggc

SEQ ID NO: 4683 - RNA, 32 nt, Artificial Sequence
  Synthetic
ggcguuggacucugccugugucgugcccggcg

SEQ ID NO: 4684 - RNA, 32 nt, Artificial Sequence
  Synthetic
gcguuggacucugccugugucgugcccggcga

SEQ ID NO: 4685 - RNA, 32 nt, Artificial Sequence
  Synthetic
cguuggacucugccugugucgugcccggcgac

SEQ ID NO: 4686 - RNA, 32 nt, Artificial Sequence
  Synthetic
guuggacucugccugugucgugcccggcgacu

SEQ ID NO: 4687 - RNA, 32 nt, Artificial Sequence
  Synthetic
uuggacucugccugugucgugcccggcgacug

SEQ ID NO: 4688 - RNA, 32 nt, Artificial Sequence
  Synthetic
uggacucugccugugucgugcccggcgacugc

SEQ ID NO: 4689 - RNA, 32 nt, Artificial Sequence
  Synthetic
ggacucugccugugucgugcccggcgacugcc

SEQ ID NO: 4690 - RNA, 32 nt, Artificial Sequence
  Synthetic
gacucugccugugucgugcccggcgacugccu

SEQ ID NO: 4691 - RNA, 32 nt, Artificial Sequence
  Synthetic
acucugccugugucgugcccggcgacugccug

SEQ ID NO: 4692 - RNA, 32 nt, Artificial Sequence
  Synthetic
cucugccugugucgugcccggcgacugccugu

SEQ ID NO: 4693 - RNA, 32 nt, Artificial Sequence
  Synthetic
ucugccugugucgugcccggcgacugccugua

SEQ ID NO: 4694 - RNA, 32 nt, Artificial Sequence
  Synthetic
cugccugugucgugcccggcgacugccuguag

SEQ ID NO: 4695 - RNA, 32 nt, Artificial Sequence
  Synthetic
ugccugugucgugcccggcgacugccuguagc

SEQ ID NO: 4696 - RNA, 32 nt, Artificial Sequence
  Synthetic
gccugugucgugcccggcgacugccuguagca

SEQ ID NO: 4697 - RNA, 32 nt, Artificial Sequence
  Synthetic
ccugugucgugcccggcgacugccuguagcaa

SEQ ID NO: 4698 - RNA, 32 nt, Artificial Sequence
  Synthetic
cugugucgugcccggcgacugccuguagcaac

SEQ ID NO: 4699 - RNA, 32 nt, Artificial Sequence
  Synthetic
ugugucgugcccggcgacugccuguagcaacc

SEQ ID NO: 4700 - RNA, 32 nt, Artificial Sequence
  Synthetic
gugucgugcccggcgacugccuguagcaacca

SEQ ID NO: 4701 - RNA, 32 nt, Artificial Sequence
  Synthetic
ugucgugcccggcgacugccuguagcaaccau

SEQ ID NO: 4702 - RNA, 32 nt, Artificial Sequence
  Synthetic
gucgugcccggcgacugccuguagcaaccauc

SEQ ID NO: 4703 - RNA, 32 nt, Artificial Sequence
  Synthetic
ucgugcccggcgacugccuguagcaaccaucu

SEQ ID NO: 4704 - RNA, 32 nt, Artificial Sequence
  Synthetic
cgugcccggcgacugccuguagcaaccaucuu

SEQ ID NO: 4705 - RNA, 32 nt, Artificial Sequence
  Synthetic
gugcccggcgacugccuguagcaaccaucuuc

SEQ ID NO: 4706 - RNA, 32 nt, Artificial Sequence
  Synthetic
ugcccggcgacugccuguagcaaccaucuuca

SEQ ID NO: 4707 - RNA, 32 nt, Artificial Sequence
  Synthetic
gcccggcgacugccuguagcaaccaucuucac

SEQ ID NO: 4708 - RNA, 32 nt, Artificial Sequence
  Synthetic
cccggcgacugccuguagcaaccaucuucacc

SEQ ID NO: 4709 - RNA, 32 nt, Artificial Sequence
  Synthetic
ccggcgacugccuguagcaaccaucuucacca

SEQ ID NO: 4710 - RNA, 32 nt, Artificial Sequence
  Synthetic
cggcgacugccuguagcaaccaucuucaccac

SEQ ID NO: 4711 - RNA, 32 nt, Artificial Sequence
  Synthetic
ggcgacugccuguagcaaccaucuucaccacc

SEQ ID NO: 4712 - RNA, 32 nt, Artificial Sequence
  Synthetic
gcgacugccuguagcaaccaucuucaccaccc

SEQ ID NO: 4713 - RNA, 32 nt, Artificial Sequence
  Synthetic
cgacugccuguagcaaccaucuucaccaccca

SEQ ID NO: 4714 - RNA, 32 nt, Artificial Sequence
  Synthetic
gacugccuguagcaaccaucuucaccacccau

SEQ ID NO: 4715 - RNA, 32 nt, Artificial Sequence
  Synthetic
acugccuguagcaaccaucuucaccacccaug

SEQ ID NO: 4716 - RNA, 32 nt, Artificial Sequence
  Synthetic
cugccuguagcaaccaucuucaccacccaugc

SEQ ID NO: 4717 - RNA, 32 nt, Artificial Sequence
  Synthetic
ugccuguagcaaccaucuucaccacccaugcc

SEQ ID NO: 4718 - RNA, 32 nt, Artificial Sequence
  Synthetic
gccuguagcaaccaucuucaccacccaugcca

SEQ ID NO: 4719 - RNA, 32 nt, Artificial Sequence
  Synthetic
ccuguagcaaccaucuucaccacccaugccac

SEQ ID NO: 4720 - RNA, 32 nt, Artificial Sequence
  Synthetic
cuguagcaaccaucuucaccacccaugccacg

SEQ ID NO: 4721 - RNA, 32 nt, Artificial Sequence
  Synthetic
uguagcaaccaucuucaccacccaugccacgc

SEQ ID NO: 4722 - RNA, 32 nt, Artificial Sequence
  Synthetic
guagcaaccaucuucaccacccaugccacgcu

SEQ ID NO: 4723 - RNA, 32 nt, Artificial Sequence
  Synthetic
uagcaaccaucuucaccacccaugccacgcug

SEQ ID NO: 4724 - RNA, 32 nt, Artificial Sequence
  Synthetic
agcaaccaucuucaccacccaugccacgcugc

SEQ ID NO: 4725 - RNA, 32 nt, Artificial Sequence
  Synthetic
gcaaccaucuucaccacccaugccacgcugcu

SEQ ID NO: 4726 - RNA, 32 nt, Artificial Sequence
  Synthetic
caaccaucuucaccacccaugccacgcugcug

SEQ ID NO: 4727 - RNA, 32 nt, Artificial Sequence
  Synthetic
aaccaucuucaccacccaugccacgcugcugg

SEQ ID NO: 4728 - RNA, 32 nt, Artificial Sequence
  Synthetic
accaucuucaccacccaugccacgcugcuggg

SEQ ID NO: 4729 - RNA, 32 nt, Artificial Sequence
  Synthetic
ccaucuucaccacccaugccacgcugcugggg

SEQ ID NO: 4730 - RNA, 32 nt, Artificial Sequence
  Synthetic
caucuucaccacccaugccacgcugcuggggc

SEQ ID NO: 4731 - RNA, 32 nt, Artificial Sequence
  Synthetic
aucuucaccacccaugccacgcugcuggggcg

SEQ ID NO: 4732 - RNA, 32 nt, Artificial Sequence
  Synthetic
ucuucaccacccaugccacgcugcuggggcgc

SEQ ID NO: 4733 - RNA, 32 nt, Artificial Sequence
  Synthetic
cuucaccacccaugccacgcugcuggggcgcu

SEQ ID NO: 4734 - RNA, 32 nt, Artificial Sequence
  Synthetic
uucaccacccaugccacgcugcuggggcgcua

SEQ ID NO: 4735 - RNA, 32 nt, Artificial Sequence
  Synthetic
ucaccacccaugccacgcugcuggggcgcuac

SEQ ID NO: 4736 - RNA, 32 nt, Artificial Sequence
  Synthetic
caccacccaugccacgcugcuggggcgcuacc

SEQ ID NO: 4737 - RNA, 32 nt, Artificial Sequence
  Synthetic
accacccaugccacgcugcuggggcgcuaccu

SEQ ID NO: 4738 - RNA, 32 nt, Artificial Sequence
  Synthetic
ccacccaugccacgcugcuggggcgcuaccug

SEQ ID NO: 4739 - RNA, 32 nt, Artificial Sequence
  Synthetic
cacccaugccacgcugcuggggcgcuaccugu

SEQ ID NO: 4740 - RNA, 32 nt, Artificial Sequence
  Synthetic
acccaugccacgcugcuggggcgcuaccugug

SEQ ID NO: 4741 - RNA, 32 nt, Artificial Sequence
  Synthetic
cccaugccacgcugcuggggcgcuaccugugu

SEQ ID NO: 4742 - RNA, 32 nt, Artificial Sequence
  Synthetic
ccaugccacgcugcuggggcgcuaccugugug

SEQ ID NO: 4743 - RNA, 32 nt, Artificial Sequence
  Synthetic
caugccacgcugcuggggcgcuaccugugugc

SEQ ID NO: 4744 - RNA, 32 nt, Artificial Sequence
  Synthetic
augccacgcugcuggggcgcuaccugugugcc

SEQ ID NO: 4745 - RNA, 32 nt, Artificial Sequence
  Synthetic
ugccacgcugcuggggcgcuaccugugugccg

SEQ ID NO: 4746 - RNA, 32 nt, Artificial Sequence
  Synthetic
gccacgcugcuggggcgcuaccugugugccgg

SEQ ID NO: 4747 - RNA, 32 nt, Artificial Sequence
  Synthetic
ccacgcugcuggggcgcuaccugugugccggu

SEQ ID NO: 4748 - RNA, 32 nt, Artificial Sequence
  Synthetic
cacgcugcuggggcgcuaccugugugccggug

SEQ ID NO: 4749 - RNA, 32 nt, Artificial Sequence
  Synthetic
acgcugcuggggcgcuaccugugugccggugc

SEQ ID NO: 4750 - RNA, 32 nt, Artificial Sequence
  Synthetic
cgcugcuggggcgcuaccugugugccggugcc

SEQ ID NO: 4751 - RNA, 32 nt, Artificial Sequence
  Synthetic
gcugcuggggcgcuaccugugugccggugccg

SEQ ID NO: 4752 - RNA, 32 nt, Artificial Sequence
  Synthetic
cugcuggggcgcuaccugugugccggugccgu

SEQ ID NO: 4753 - RNA, 32 nt, Artificial Sequence
  Synthetic
ugcuggggcgcuaccugugugccggugccgug

SEQ ID NO: 4754 - RNA, 32 nt, Artificial Sequence
  Synthetic
gcuggggcgcuaccugugugccggugccgugg

SEQ ID NO: 4755 - RNA, 32 nt, Artificial Sequence
  Synthetic
cuggggcgcuaccugugugccggugccgugga

SEQ ID NO: 4756 - RNA, 32 nt, Artificial Sequence
  Synthetic
uggggcgcuaccugugugccggugccguggac

SEQ ID NO: 4757 - RNA, 32 nt, Artificial Sequence
  Synthetic
ggggcgcuaccugugugccggugccguggacu

SEQ ID NO: 4758 - RNA, 32 nt, Artificial Sequence
  Synthetic
gggcgcuaccugugugccggugccguggacuu

SEQ ID NO: 4759 - RNA, 32 nt, Artificial Sequence
  Synthetic
ggcgcuaccugugugccggugccguggacuuc

SEQ ID NO: 4760 - RNA, 32 nt, Artificial Sequence
  Synthetic
gcgcuaccugugugccggugccguggacuucu

SEQ ID NO: 4761 - RNA, 32 nt, Artificial Sequence
  Synthetic
cgcuaccugugugccggugccguggacuucua

SEQ ID NO: 4762 - RNA, 32 nt, Artificial Sequence
  Synthetic
gcuaccugugugccggugccguggacuucuac

SEQ ID NO: 4763 - RNA, 32 nt, Artificial Sequence
  Synthetic
cuaccugugugccggugccguggacuucuaca

SEQ ID NO: 4764 - RNA, 32 nt, Artificial Sequence
  Synthetic
uaccugugugccggugccguggacuucuacaa

SEQ ID NO: 4765 - RNA, 32 nt, Artificial Sequence
  Synthetic
accugugugccggugccguggacuucuacaac

SEQ ID NO: 4766 - RNA, 32 nt, Artificial Sequence
  Synthetic
ccugugugccggugccguggacuucuacaaca

SEQ ID NO: 4767 - RNA, 32 nt, Artificial Sequence
  Synthetic
cugugugccggugccguggacuucuacaacaa

SEQ ID NO: 4768 - RNA, 32 nt, Artificial Sequence
  Synthetic
ugugugccggugccguggacuucuacaacaac

SEQ ID NO: 4769 - RNA, 32 nt, Artificial Sequence
  Synthetic
gugugccggugccguggacuucuacaacaacc

SEQ ID NO: 4770 - RNA, 32 nt, Artificial Sequence
  Synthetic
ugugccggugccguggacuucuacaacaaccu

SEQ ID NO: 4771 - RNA, 32 nt, Artificial Sequence
  Synthetic
gugccggugccguggacuucuacaacaaccug

SEQ ID NO: 4772 - RNA, 32 nt, Artificial Sequence
  Synthetic
ugccggugccguggacuucuacaacaaccugg

SEQ ID NO: 4773 - RNA, 32 nt, Artificial Sequence
  Synthetic
gccggugccguggacuucuacaacaaccugga

SEQ ID NO: 4774 - RNA, 32 nt, Artificial Sequence
  Synthetic
ccggugccguggacuucuacaacaaccuggag

SEQ ID NO: 4775 - RNA, 32 nt, Artificial Sequence
  Synthetic
cggugccguggacuucuacaacaaccuggaga

SEQ ID NO: 4776 - RNA, 32 nt, Artificial Sequence
  Synthetic
ggugccguggacuucuacaacaaccuggagaa

SEQ ID NO: 4777 - RNA, 32 nt, Artificial Sequence
  Synthetic
gugccguggacuucuacaacaaccuggagaac

SEQ ID NO: 4778 - RNA, 32 nt, Artificial Sequence
  Synthetic
ugccguggacuucuacaacaaccuggagaacu

SEQ ID NO: 4779 - RNA, 32 nt, Artificial Sequence
  Synthetic
gccguggacuucuacaacaaccuggagaacuu

SEQ ID NO: 4780 - RNA, 32 nt, Artificial Sequence
  Synthetic
ccguggacuucuacaacaaccuggagaacuuc

SEQ ID NO: 4781 - RNA, 32 nt, Artificial Sequence
  Synthetic
cguggacuucuacaacaaccuggagaacuuca

SEQ ID NO: 4782 - RNA, 32 nt, Artificial Sequence
  Synthetic
guggacuucuacaacaaccuggagaacuucaa

SEQ ID NO: 4783 - RNA, 32 nt, Artificial Sequence
  Synthetic
uggacuucuacaacaaccuggagaacuucaac

SEQ ID NO: 4784 - RNA, 32 nt, Artificial Sequence
  Synthetic
ggacuucuacaacaaccuggagaacuucaacg

SEQ ID NO: 4785 - RNA, 32 nt, Artificial Sequence
  Synthetic
gacuucuacaacaaccuggagaacuucaacgu

SEQ ID NO: 4786 - RNA, 32 nt, Artificial Sequence
  Synthetic
acuucuacaacaaccuggagaacuucaacgug

SEQ ID NO: 4787 - RNA, 32 nt, Artificial Sequence
  Synthetic
cuucuacaacaaccuggagaacuucaacgugg

SEQ ID NO: 4788 - RNA, 32 nt, Artificial Sequence
  Synthetic
uucuacaacaaccuggagaacuucaacgugga

SEQ ID NO: 4789 - RNA, 32 nt, Artificial Sequence
  Synthetic
ucuacaacaaccuggagaacuucaacguggac

SEQ ID NO: 4790 - RNA, 32 nt, Artificial Sequence
  Synthetic
cuacaacaaccuggagaacuucaacguggaca

SEQ ID NO: 4791 - RNA, 32 nt, Artificial Sequence
  Synthetic
uacaacaaccuggagaacuucaacguggacaa

SEQ ID NO: 4792 - RNA, 32 nt, Artificial Sequence
  Synthetic
acaacaaccuggagaacuucaacguggacaag

SEQ ID NO: 4793 - RNA, 32 nt, Artificial Sequence
  Synthetic
caacaaccuggagaacuucaacguggacaagg

SEQ ID NO: 4794 - RNA, 32 nt, Artificial Sequence
  Synthetic
aacaaccuggagaacuucaacguggacaagga

SEQ ID NO: 4795 - RNA, 32 nt, Artificial Sequence
  Synthetic
acaaccuggagaacuucaacguggacaaggaa

SEQ ID NO: 4796 - RNA, 32 nt, Artificial Sequence
  Synthetic
caaccuggagaacuucaacguggacaaggaag

SEQ ID NO: 4797 - RNA, 32 nt, Artificial Sequence
  Synthetic
aaccuggagaacuucaacguggacaaggaagc

SEQ ID NO: 4798 - RNA, 32 nt, Artificial Sequence
  Synthetic
accuggagaacuucaacguggacaaggaagca

SEQ ID NO: 4799 - RNA, 32 nt, Artificial Sequence
  Synthetic
ccuggagaacuucaacguggacaaggaagcag

SEQ ID NO: 4800 - RNA, 32 nt, Artificial Sequence
  Synthetic
cuggagaacuucaacguggacaaggaagcagg

SEQ ID NO: 4801 - RNA, 32 nt, Artificial Sequence
  Synthetic
uggagaacuucaacguggacaaggaagcaggg

SEQ ID NO: 4802 - RNA, 32 nt, Artificial Sequence
  Synthetic
ggagaacuucaacguggacaaggaagcagggg

SEQ ID NO: 4803 - RNA, 32 nt, Artificial Sequence
  Synthetic
gagaacuucaacguggacaaggaagcagggga

SEQ ID NO: 4804 - RNA, 32 nt, Artificial Sequence
  Synthetic
agaacuucaacguggacaaggaagcaggggag

SEQ ID NO: 4805 - RNA, 32 nt, Artificial Sequence
  Synthetic
gaacuucaacguggacaaggaagcaggggaga

SEQ ID NO: 4806 - RNA, 32 nt, Artificial Sequence
  Synthetic
aacuucaacguggacaaggaagcaggggagag

SEQ ID NO: 4807 - RNA, 32 nt, Artificial Sequence
  Synthetic
acuucaacguggacaaggaagcaggggagagg

SEQ ID NO: 4808 - RNA, 32 nt, Artificial Sequence
  Synthetic
cuucaacguggacaaggaagcaggggagaggc

SEQ ID NO: 4809 - RNA, 32 nt, Artificial Sequence
  Synthetic
uucaacguggacaaggaagcaggggagaggca

SEQ ID NO: 4810 - RNA, 32 nt, Artificial Sequence
  Synthetic
ucaacguggacaaggaagcaggggagaggcag

SEQ ID NO: 4811 - RNA, 32 nt, Artificial Sequence
  Synthetic
caacguggacaaggaagcaggggagaggcaga

SEQ ID NO: 4812 - RNA, 32 nt, Artificial Sequence
  Synthetic
aacguggacaaggaagcaggggagaggcagau

SEQ ID NO: 4813 - RNA, 32 nt, Artificial Sequence
  Synthetic
acguggacaaggaagcaggggagaggcagauc

SEQ ID NO: 4814 - RNA, 32 nt, Artificial Sequence
  Synthetic
cguggacaaggaagcaggggagaggcagaucu

SEQ ID NO: 4815 - RNA, 32 nt, Artificial Sequence
  Synthetic
guggacaaggaagcaggggagaggcagaucua

SEQ ID NO: 4816 - RNA, 32 nt, Artificial Sequence
  Synthetic
uggacaaggaagcaggggagaggcagaucuac

SEQ ID NO: 4817 - RNA, 32 nt, Artificial Sequence
  Synthetic
ggacaaggaagcaggggagaggcagaucuacc

SEQ ID NO: 4818 - RNA, 32 nt, Artificial Sequence
  Synthetic
gacaaggaagcaggggagaggcagaucuacca

SEQ ID NO: 4819 - RNA, 32 nt, Artificial Sequence
  Synthetic
acaaggaagcaggggagaggcagaucuaccac

SEQ ID NO: 4820 - RNA, 32 nt, Artificial Sequence
  Synthetic
caaggaagcaggggagaggcagaucuaccacc

SEQ ID NO: 4821 - RNA, 32 nt, Artificial Sequence
  Synthetic
aaggaagcaggggagaggcagaucuaccaccg

SEQ ID NO: 4822 - RNA, 32 nt, Artificial Sequence
  Synthetic
aggaagcaggggagaggcagaucuaccaccga

SEQ ID NO: 4823 - RNA, 32 nt, Artificial Sequence
  Synthetic
ggaagcaggggagaggcagaucuaccaccgau

SEQ ID NO: 4824 - RNA, 32 nt, Artificial Sequence
  Synthetic
gaagcaggggagaggcagaucuaccaccgaua

SEQ ID NO: 4825 - RNA, 32 nt, Artificial Sequence
  Synthetic
aagcaggggagaggcagaucuaccaccgauac

SEQ ID NO: 4826 - RNA, 32 nt, Artificial Sequence
  Synthetic
agcaggggagaggcagaucuaccaccgauacu

SEQ ID NO: 4827 - RNA, 32 nt, Artificial Sequence
  Synthetic
gcaggggagaggcagaucuaccaccgauacug

SEQ ID NO: 4828 - RNA, 32 nt, Artificial Sequence
  Synthetic
caggggagaggcagaucuaccaccgauacugc

SEQ ID NO: 4829 - RNA, 32 nt, Artificial Sequence
  Synthetic
aggggagaggcagaucuaccaccgauacugca

SEQ ID NO: 4830 - RNA, 32 nt, Artificial Sequence
  Synthetic
ggggagaggcagaucuaccaccgauacugcau

SEQ ID NO: 4831 - RNA, 32 nt, Artificial Sequence
  Synthetic
gggagaggcagaucuaccaccgauacugcaug

SEQ ID NO: 4832 - RNA, 32 nt, Artificial Sequence
  Synthetic
ggagaggcagaucuaccaccgauacugcaugg

SEQ ID NO: 4833 - RNA, 32 nt, Artificial Sequence
  Synthetic
gagaggcagaucuaccaccgauacugcaugga

SEQ ID NO: 4834 - RNA, 32 nt, Artificial Sequence
  Synthetic
agaggcagaucuaccaccgauacugcauggaa

SEQ ID NO: 4835 - RNA, 32 nt, Artificial Sequence
  Synthetic
gaggcagaucuaccaccgauacugcauggaaa

SEQ ID NO: 4836 - RNA, 32 nt, Artificial Sequence
  Synthetic
aggcagaucuaccaccgauacugcauggaaag

SEQ ID NO: 4837 - RNA, 32 nt, Artificial Sequence
  Synthetic
ggcagaucuaccaccgauacugcauggaaagg

SEQ ID NO: 4838 - RNA, 32 nt, Artificial Sequence
  Synthetic
gcagaucuaccaccgauacugcauggaaaggg

SEQ ID NO: 4839 - RNA, 32 nt, Artificial Sequence
  Synthetic
cagaucuaccaccgauacugcauggaaagggc

SEQ ID NO: 4840 - RNA, 32 nt, Artificial Sequence
  Synthetic
agaucuaccaccgauacugcauggaaagggcg

SEQ ID NO: 4841 - RNA, 32 nt, Artificial Sequence
  Synthetic
gaucuaccaccgauacugcauggaaagggcgg

SEQ ID NO: 4842 - RNA, 32 nt, Artificial Sequence
  Synthetic
aucuaccaccgauacugcauggaaagggcggc

SEQ ID NO: 4843 - RNA, 32 nt, Artificial Sequence
  Synthetic
ucuaccaccgauacugcauggaaagggcggca

SEQ ID NO: 4844 - RNA, 32 nt, Artificial Sequence
  Synthetic
cuaccaccgauacugcauggaaagggcggcag

SEQ ID NO: 4845 - RNA, 32 nt, Artificial Sequence
  Synthetic
uaccaccgauacugcauggaaagggcggcagc

SEQ ID NO: 4846 - RNA, 32 nt, Artificial Sequence
  Synthetic
accaccgauacugcauggaaagggcggcagcc

SEQ ID NO: 4847 - RNA, 32 nt, Artificial Sequence
  Synthetic
ccaccgauacugcauggaaagggcggcagccc

SEQ ID NO: 4848 - RNA, 32 nt, Artificial Sequence
  Synthetic
caccgauacugcauggaaagggcggcagccca

SEQ ID NO: 4849 - RNA, 32 nt, Artificial Sequence
  Synthetic
accgauacugcauggaaagggcggcagcccac

SEQ ID NO: 4850 - RNA, 32 nt, Artificial Sequence
  Synthetic
ccgauacugcauggaaagggcggcagcccacu

SEQ ID NO: 4851 - RNA, 32 nt, Artificial Sequence
  Synthetic
cgauacugcauggaaagggcggcagcccacug

SEQ ID NO: 4852 - RNA, 32 nt, Artificial Sequence
  Synthetic
gauacugcauggaaagggcggcagcccacugc

SEQ ID NO: 4853 - RNA, 32 nt, Artificial Sequence
  Synthetic
auacugcauggaaagggcggcagcccacugcg

SEQ ID NO: 4854 - RNA, 32 nt, Artificial Sequence
  Synthetic
uacugcauggaaagggcggcagcccacugcgc

SEQ ID NO: 4855 - RNA, 32 nt, Artificial Sequence
  Synthetic
acugcauggaaagggcggcagcccacugcgcu

SEQ ID NO: 4856 - RNA, 32 nt, Artificial Sequence
  Synthetic
cugcauggaaagggcggcagcccacugcgcuc

SEQ ID NO: 4857 - RNA, 32 nt, Artificial Sequence
  Synthetic
ugcauggaaagggcggcagcccacugcgcuca

SEQ ID NO: 4858 - RNA, 32 nt, Artificial Sequence
  Synthetic
gcauggaaagggcggcagcccacugcgcucac

SEQ ID NO: 4859 - RNA, 32 nt, Artificial Sequence
  Synthetic
cauggaaagggcggcagcccacugcgcucacg

SEQ ID NO: 4860 - RNA, 32 nt, Artificial Sequence
  Synthetic
auggaaagggcggcagcccacugcgcucacgu

SEQ ID NO: 4861 - RNA, 32 nt, Artificial Sequence
  Synthetic
uggaaagggcggcagcccacugcgcucacguc

SEQ ID NO: 4862 - RNA, 32 nt, Artificial Sequence
  Synthetic
ggaaagggcggcagcccacugcgcucacgucu

SEQ ID NO: 4863 - RNA, 32 nt, Artificial Sequence
  Synthetic
gaaagggcggcagcccacugcgcucacgucuu

SEQ ID NO: 4864 - RNA, 32 nt, Artificial Sequence
  Synthetic
aaagggcggcagcccacugcgcucacgucuuc

SEQ ID NO: 4865 - RNA, 32 nt, Artificial Sequence
  Synthetic
aagggcggcagcccacugcgcucacgucuuca

SEQ ID NO: 4866 - RNA, 32 nt, Artificial Sequence
  Synthetic
agggcggcagcccacugcgcucacgucuucac

SEQ ID NO: 4867 - RNA, 32 nt, Artificial Sequence
  Synthetic
gggcggcagcccacugcgcucacgucuucacu

SEQ ID NO: 4868 - RNA, 32 nt, Artificial Sequence
  Synthetic
ggcggcagcccacugcgcucacgucuucacua

SEQ ID NO: 4869 - RNA, 32 nt, Artificial Sequence
  Synthetic
gcggcagcccacugcgcucacgucuucacuac

SEQ ID NO: 4870 - RNA, 32 nt, Artificial Sequence
  Synthetic
cggcagcccacugcgcucacgucuucacuacu

SEQ ID NO: 4871 - RNA, 32 nt, Artificial Sequence
  Synthetic
ggcagcccacugcgcucacgucuucacuacug

SEQ ID NO: 4872 - RNA, 32 nt, Artificial Sequence
  Synthetic
gcagcccacugcgcucacgucuucacuacugu

SEQ ID NO: 4873 - RNA, 32 nt, Artificial Sequence
  Synthetic
cagcccacugcgcucacgucuucacuacugug

SEQ ID NO: 4874 - RNA, 32 nt, Artificial Sequence
  Synthetic
agcccacugcgcucacgucuucacuacugugu

SEQ ID NO: 4875 - RNA, 32 nt, Artificial Sequence
  Synthetic
gcccacugcgcucacgucuucacuacuguguc

SEQ ID NO: 4876 - RNA, 32 nt, Artificial Sequence
  Synthetic
cccacugcgcucacgucuucacuacugugucc

SEQ ID NO: 4877 - RNA, 32 nt, Artificial Sequence
  Synthetic
ccacugcgcucacgucuucacuacuguguccc

SEQ ID NO: 4878 - RNA, 32 nt, Artificial Sequence
  Synthetic
cacugcgcucacgucuucacuacuguguccca

SEQ ID NO: 4879 - RNA, 32 nt, Artificial Sequence
  Synthetic
acugcgcucacgucuucacuacugugucccag

SEQ ID NO: 4880 - RNA, 32 nt, Artificial Sequence
  Synthetic
cugcgcucacgucuucacuacugugucccaga

SEQ ID NO: 4881 - RNA, 32 nt, Artificial Sequence
  Synthetic
ugcgcucacgucuucacuacugugucccagau

SEQ ID NO: 4882 - RNA, 32 nt, Artificial Sequence
  Synthetic
gcgcucacgucuucacuacugugucccagauc

SEQ ID NO: 4883 - RNA, 32 nt, Artificial Sequence
  Synthetic
cgcucacgucuucacuacugugucccagauca

SEQ ID NO: 4884 - RNA, 32 nt, Artificial Sequence
  Synthetic
gcucacgucuucacuacugugucccagaucac

SEQ ID NO: 4885 - RNA, 32 nt, Artificial Sequence
  Synthetic
cucacgucuucacuacugugucccagaucacc

SEQ ID NO: 4886 - RNA, 32 nt, Artificial Sequence
  Synthetic
ucacgucuucacuacugugucccagaucaccg

SEQ ID NO: 4887 - RNA, 32 nt, Artificial Sequence
  Synthetic
cacgucuucacuacugugucccagaucaccgc

SEQ ID NO: 4888 - RNA, 32 nt, Artificial Sequence
  Synthetic
acgucuucacuacugugucccagaucaccgcc

SEQ ID NO: 4889 - RNA, 32 nt, Artificial Sequence
  Synthetic
cgucuucacuacugugucccagaucaccgcca

SEQ ID NO: 4890 - RNA, 32 nt, Artificial Sequence
  Synthetic
gucuucacuacugugucccagaucaccgccau

SEQ ID NO: 4891 - RNA, 32 nt, Artificial Sequence
  Synthetic
ucuucacuacugugucccagaucaccgccauc

SEQ ID NO: 4892 - RNA, 32 nt, Artificial Sequence
  Synthetic
cuucacuacugugucccagaucaccgccaucg

SEQ ID NO: 4893 - RNA, 32 nt, Artificial Sequence
  Synthetic
uucacuacugugucccagaucaccgccaucga

SEQ ID NO: 4894 - RNA, 32 nt, Artificial Sequence
  Synthetic
ucacuacugugucccagaucaccgccaucgag

SEQ ID NO: 4895 - RNA, 32 nt, Artificial Sequence
  Synthetic
cacuacugugucccagaucaccgccaucgagg

SEQ ID NO: 4896 - RNA, 32 nt, Artificial Sequence
  Synthetic
acuacugugucccagaucaccgccaucgaggc

SEQ ID NO: 4897 - RNA, 32 nt, Artificial Sequence
  Synthetic
cuacugugucccagaucaccgccaucgaggca

SEQ ID NO: 4898 - RNA, 32 nt, Artificial Sequence
  Synthetic
uacugugucccagaucaccgccaucgaggcac

SEQ ID NO: 4899 - RNA, 32 nt, Artificial Sequence
  Synthetic
acugugucccagaucaccgccaucgaggcaca

SEQ ID NO: 4900 - RNA, 32 nt, Artificial Sequence
  Synthetic
cugugucccagaucaccgccaucgaggcacag

SEQ ID NO: 4901 - RNA, 32 nt, Artificial Sequence
  Synthetic
ugugucccagaucaccgccaucgaggcacagc

SEQ ID NO: 4902 - RNA, 32 nt, Artificial Sequence
  Synthetic
gugucccagaucaccgccaucgaggcacagca

SEQ ID NO: 4903 - RNA, 32 nt, Artificial Sequence
  Synthetic
ugucccagaucaccgccaucgaggcacagcac

SEQ ID NO: 4904 - RNA, 32 nt, Artificial Sequence
  Synthetic
gucccagaucaccgccaucgaggcacagcacu

SEQ ID NO: 4905 - RNA, 32 nt, Artificial Sequence
  Synthetic
ucccagaucaccgccaucgaggcacagcacuu

SEQ ID NO: 4906 - RNA, 32 nt, Artificial Sequence
  Synthetic
cccagaucaccgccaucgaggcacagcacuug

SEQ ID NO: 4907 - RNA, 32 nt, Artificial Sequence
  Synthetic
ccagaucaccgccaucgaggcacagcacuugc

SEQ ID NO: 4908 - RNA, 32 nt, Artificial Sequence
  Synthetic
cagaucaccgccaucgaggcacagcacuugcu

SEQ ID NO: 4909 - RNA, 32 nt, Artificial Sequence
  Synthetic
agaucaccgccaucgaggcacagcacuugcuc

SEQ ID NO: 4910 - RNA, 32 nt, Artificial Sequence
  Synthetic
gaucaccgccaucgaggcacagcacuugcuca

SEQ ID NO: 4911 - RNA, 32 nt, Artificial Sequence
  Synthetic
aucaccgccaucgaggcacagcacuugcucaa

SEQ ID NO: 4912 - RNA, 32 nt, Artificial Sequence
  Synthetic
ucaccgccaucgaggcacagcacuugcucaag

SEQ ID NO: 4913 - RNA, 32 nt, Artificial Sequence
  Synthetic
caccgccaucgaggcacagcacuugcucaaga

SEQ ID NO: 4914 - RNA, 32 nt, Artificial Sequence
  Synthetic
accgccaucgaggcacagcacuugcucaagag

SEQ ID NO: 4915 - RNA, 32 nt, Artificial Sequence
  Synthetic
ccgccaucgaggcacagcacuugcucaagagg

SEQ ID NO: 4916 - RNA, 32 nt, Artificial Sequence
  Synthetic
cgccaucgaggcacagcacuugcucaagagga

SEQ ID NO: 4917 - RNA, 32 nt, Artificial Sequence
  Synthetic
gccaucgaggcacagcacuugcucaagaggaa

SEQ ID NO: 4918 - RNA, 32 nt, Artificial Sequence
  Synthetic
ccaucgaggcacagcacuugcucaagaggaaa

SEQ ID NO: 4919 - RNA, 32 nt, Artificial Sequence
  Synthetic
caucgaggcacagcacuugcucaagaggaaac

SEQ ID NO: 4920 - RNA, 32 nt, Artificial Sequence
  Synthetic
aucgaggcacagcacuugcucaagaggaaacc

SEQ ID NO: 4921 - RNA, 32 nt, Artificial Sequence
  Synthetic
ucgaggcacagcacuugcucaagaggaaacca

SEQ ID NO: 4922 - RNA, 32 nt, Artificial Sequence
  Synthetic
cgaggcacagcacuugcucaagaggaaaccag

SEQ ID NO: 4923 - RNA, 32 nt, Artificial Sequence
  Synthetic
gaggcacagcacuugcucaagaggaaaccaga

SEQ ID NO: 4924 - RNA, 32 nt, Artificial Sequence
  Synthetic
aggcacagcacuugcucaagaggaaaccagau

SEQ ID NO: 4925 - RNA, 32 nt, Artificial Sequence
  Synthetic
ggcacagcacuugcucaagaggaaaccagaua

SEQ ID NO: 4926 - RNA, 32 nt, Artificial Sequence
  Synthetic
gcacagcacuugcucaagaggaaaccagauau

SEQ ID NO: 4927 - RNA, 32 nt, Artificial Sequence
  Synthetic
cacagcacuugcucaagaggaaaccagauauu

SEQ ID NO: 4928 - RNA, 32 nt, Artificial Sequence
  Synthetic
acagcacuugcucaagaggaaaccagauauug

SEQ ID NO: 4929 - RNA, 32 nt, Artificial Sequence
  Synthetic
cagcacuugcucaagaggaaaccagauauugu

SEQ ID NO: 4930 - RNA, 32 nt, Artificial Sequence
  Synthetic
agcacuugcucaagaggaaaccagauauugug

SEQ ID NO: 4931 - RNA, 32 nt, Artificial Sequence
  Synthetic
gcacuugcucaagaggaaaccagauauuguga

SEQ ID NO: 4932 - RNA, 32 nt, Artificial Sequence
  Synthetic
cacuugcucaagaggaaaccagauauugugac

SEQ ID NO: 4933 - RNA, 32 nt, Artificial Sequence
  Synthetic
acuugcucaagaggaaaccagauauugugacc

SEQ ID NO: 4934 - RNA, 32 nt, Artificial Sequence
  Synthetic
cuugcucaagaggaaaccagauauugugaccc

SEQ ID NO: 4935 - RNA, 32 nt, Artificial Sequence
  Synthetic
uugcucaagaggaaaccagauauugugacccc

SEQ ID NO: 4936 - RNA, 32 nt, Artificial Sequence
  Synthetic
ugcucaagaggaaaccagauauugugaccccc

SEQ ID NO: 4937 - RNA, 32 nt, Artificial Sequence
  Synthetic
gcucaagaggaaaccagauauugugaccccca

SEQ ID NO: 4938 - RNA, 32 nt, Artificial Sequence
  Synthetic
cucaagaggaaaccagauauugugacccccaa

SEQ ID NO: 4939 - RNA, 32 nt, Artificial Sequence
  Synthetic
ucaagaggaaaccagauauugugacccccaau

SEQ ID NO: 4940 - RNA, 32 nt, Artificial Sequence
  Synthetic
caagaggaaaccagauauugugacccccaaug

SEQ ID NO: 4941 - RNA, 32 nt, Artificial Sequence
  Synthetic
aagaggaaaccagauauugugacccccaaugg

SEQ ID NO: 4942 - RNA, 32 nt, Artificial Sequence
  Synthetic
agaggaaaccagauauugugacccccaauggg

SEQ ID NO: 4943 - RNA, 32 nt, Artificial Sequence
  Synthetic
gaggaaaccagauauugugacccccaaugggc

SEQ ID NO: 4944 - RNA, 32 nt, Artificial Sequence
  Synthetic
aggaaaccagauauugugacccccaaugggcu

SEQ ID NO: 4945 - RNA, 32 nt, Artificial Sequence
  Synthetic
ggaaaccagauauugugacccccaaugggcug

SEQ ID NO: 4946 - RNA, 32 nt, Artificial Sequence
  Synthetic
gaaaccagauauugugacccccaaugggcuga

SEQ ID NO: 4947 - RNA, 32 nt, Artificial Sequence
  Synthetic
aaaccagauauugugacccccaaugggcugaa

SEQ ID NO: 4948 - RNA, 32 nt, Artificial Sequence
  Synthetic
aaccagauauugugacccccaaugggcugaau

SEQ ID NO: 4949 - RNA, 32 nt, Artificial Sequence
  Synthetic
accagauauugugacccccaaugggcugaaug

SEQ ID NO: 4950 - RNA, 32 nt, Artificial Sequence
  Synthetic
ccagauauugugacccccaaugggcugaaugu

SEQ ID NO: 4951 - RNA, 32 nt, Artificial Sequence
  Synthetic
cagauauugugacccccaaugggcugaaugug

SEQ ID NO: 4952 - RNA, 32 nt, Artificial Sequence
  Synthetic
agauauugugacccccaaugggcugaauguga

SEQ ID NO: 4953 - RNA, 32 nt, Artificial Sequence
  Synthetic
gauauugugacccccaaugggcugaaugugaa

SEQ ID NO: 4954 - RNA, 32 nt, Artificial Sequence
  Synthetic
auauugugacccccaaugggcugaaugugaag

SEQ ID NO: 4955 - RNA, 32 nt, Artificial Sequence
  Synthetic
uauugugacccccaaugggcugaaugugaaga

SEQ ID NO: 4956 - RNA, 32 nt, Artificial Sequence
  Synthetic
auugugacccccaaugggcugaaugugaagaa

SEQ ID NO: 4957 - RNA, 32 nt, Artificial Sequence
  Synthetic
uugugacccccaaugggcugaaugugaagaag

SEQ ID NO: 4958 - RNA, 32 nt, Artificial Sequence
  Synthetic
ugugacccccaaugggcugaaugugaagaagu

SEQ ID NO: 4959 - RNA, 32 nt, Artificial Sequence
  Synthetic
gugacccccaaugggcugaaugugaagaaguu

SEQ ID NO: 4960 - RNA, 32 nt, Artificial Sequence
  Synthetic
ugacccccaaugggcugaaugugaagaaguuu

SEQ ID NO: 4961 - RNA, 32 nt, Artificial Sequence
  Synthetic
gacccccaaugggcugaaugugaagaaguuuu

SEQ ID NO: 4962 - RNA, 32 nt, Artificial Sequence
  Synthetic
acccccaaugggcugaaugugaagaaguuuuc

SEQ ID NO: 4963 - RNA, 32 nt, Artificial Sequence
  Synthetic
cccccaaugggcugaaugugaagaaguuuucu

SEQ ID NO: 4964 - RNA, 32 nt, Artificial Sequence
  Synthetic
ccccaaugggcugaaugugaagaaguuuucug

SEQ ID NO: 4965 - RNA, 32 nt, Artificial Sequence
  Synthetic
cccaaugggcugaaugugaagaaguuuucugc

SEQ ID NO: 4966 - RNA, 32 nt, Artificial Sequence
  Synthetic
ccaaugggcugaaugugaagaaguuuucugcc

SEQ ID NO: 4967 - RNA, 32 nt, Artificial Sequence
  Synthetic
caaugggcugaaugugaagaaguuuucugcca

SEQ ID NO: 4968 - RNA, 32 nt, Artificial Sequence
  Synthetic
aaugggcugaaugugaagaaguuuucugccau

SEQ ID NO: 4969 - RNA, 32 nt, Artificial Sequence
  Synthetic
augggcugaaugugaagaaguuuucugccaug

SEQ ID NO: 4970 - RNA, 32 nt, Artificial Sequence
  Synthetic
ugggcugaaugugaagaaguuuucugccaugc

SEQ ID NO: 4971 - RNA, 32 nt, Artificial Sequence
  Synthetic
gggcugaaugugaagaaguuuucugccaugca

SEQ ID NO: 4972 - RNA, 32 nt, Artificial Sequence
  Synthetic
ggcugaaugugaagaaguuuucugccaugcau

SEQ ID NO: 4973 - RNA, 32 nt, Artificial Sequence
  Synthetic
gcugaaugugaagaaguuuucugccaugcaug

SEQ ID NO: 4974 - RNA, 32 nt, Artificial Sequence
  Synthetic
cugaaugugaagaaguuuucugccaugcauga

SEQ ID NO: 4975 - RNA, 32 nt, Artificial Sequence
  Synthetic
ugaaugugaagaaguuuucugccaugcaugag

SEQ ID NO: 4976 - RNA, 32 nt, Artificial Sequence
  Synthetic
gaaugugaagaaguuuucugccaugcaugagu

SEQ ID NO: 4977 - RNA, 32 nt, Artificial Sequence
  Synthetic
aaugugaagaaguuuucugccaugcaugaguu

SEQ ID NO: 4978 - RNA, 32 nt, Artificial Sequence
  Synthetic
augugaagaaguuuucugccaugcaugaguuc

SEQ ID NO: 4979 - RNA, 32 nt, Artificial Sequence
  Synthetic
ugugaagaaguuuucugccaugcaugaguucc

SEQ ID NO: 4980 - RNA, 32 nt, Artificial Sequence
  Synthetic
gugaagaaguuuucugccaugcaugaguucca

SEQ ID NO: 4981 - RNA, 32 nt, Artificial Sequence
  Synthetic
ugaagaaguuuucugccaugcaugaguuccag

SEQ ID NO: 4982 - RNA, 32 nt, Artificial Sequence
  Synthetic
gaagaaguuuucugccaugcaugaguuccaga

SEQ ID NO: 4983 - RNA, 32 nt, Artificial Sequence
  Synthetic
aagaaguuuucugccaugcaugaguuccagaa

SEQ ID NO: 4984 - RNA, 32 nt, Artificial Sequence
  Synthetic
agaaguuuucugccaugcaugaguuccagaac

SEQ ID NO: 4985 - RNA, 32 nt, Artificial Sequence
  Synthetic
gaaguuuucugccaugcaugaguuccagaacc

SEQ ID NO: 4986 - RNA, 32 nt, Artificial Sequence
  Synthetic
aaguuuucugccaugcaugaguuccagaaccu

SEQ ID NO: 4987 - RNA, 32 nt, Artificial Sequence
  Synthetic
aguuuucugccaugcaugaguuccagaaccuc

SEQ ID NO: 4988 - RNA, 32 nt, Artificial Sequence
  Synthetic
guuuucugccaugcaugaguuccagaaccucc

SEQ ID NO: 4989 - RNA, 32 nt, Artificial Sequence
  Synthetic
uuuucugccaugcaugaguuccagaaccucca

SEQ ID NO: 4990 - RNA, 32 nt, Artificial Sequence
  Synthetic
uuucugccaugcaugaguuccagaaccuccau

SEQ ID NO: 4991 - RNA, 32 nt, Artificial Sequence
  Synthetic
uucugccaugcaugaguuccagaaccuccaug

SEQ ID NO: 4992 - RNA, 32 nt, Artificial Sequence
  Synthetic
ucugccaugcaugaguuccagaaccuccaugc

SEQ ID NO: 4993 - RNA, 32 nt, Artificial Sequence
  Synthetic
cugccaugcaugaguuccagaaccuccaugcu

SEQ ID NO: 4994 - RNA, 32 nt, Artificial Sequence
  Synthetic
ugccaugcaugaguuccagaaccuccaugcuc

SEQ ID NO: 4995 - RNA, 32 nt, Artificial Sequence
  Synthetic
gccaugcaugaguuccagaaccuccaugcuca

SEQ ID NO: 4996 - RNA, 32 nt, Artificial Sequence
  Synthetic
ccaugcaugaguuccagaaccuccaugcucag

SEQ ID NO: 4997 - RNA, 32 nt, Artificial Sequence
  Synthetic
caugcaugaguuccagaaccuccaugcucaga

SEQ ID NO: 4998 - RNA, 32 nt, Artificial Sequence
  Synthetic
augcaugaguuccagaaccuccaugcucagag

SEQ ID NO: 4999 - RNA, 32 nt, Artificial Sequence
  Synthetic
ugcaugaguuccagaaccuccaugcucagagc

SEQ ID NO: 5000 - RNA, 32 nt, Artificial Sequence
  Synthetic
gcaugaguuccagaaccuccaugcucagagca

SEQ ID NO: 5001 - RNA, 32 nt, Artificial Sequence
  Synthetic
caugaguuccagaaccuccaugcucagagcaa

SEQ ID NO: 5002 - RNA, 32 nt, Artificial Sequence
  Synthetic
augaguuccagaaccuccaugcucagagcaag

SEQ ID NO: 5003 - RNA, 32 nt, Artificial Sequence
  Synthetic
ugaguuccagaaccuccaugcucagagcaagg

SEQ ID NO: 5004 - RNA, 32 nt, Artificial Sequence
  Synthetic
gaguuccagaaccuccaugcucagagcaaggc

SEQ ID NO: 5005 - RNA, 32 nt, Artificial Sequence
  Synthetic
aguuccagaaccuccaugcucagagcaaggcu

SEQ ID NO: 5006 - RNA, 32 nt, Artificial Sequence
  Synthetic
guuccagaaccuccaugcucagagcaaggcuc

SEQ ID NO: 5007 - RNA, 32 nt, Artificial Sequence
  Synthetic
uuccagaaccuccaugcucagagcaaggcucg

SEQ ID NO: 5008 - RNA, 32 nt, Artificial Sequence
  Synthetic
uccagaaccuccaugcucagagcaaggcucga

SEQ ID NO: 5009 - RNA, 32 nt, Artificial Sequence
  Synthetic
ccagaaccuccaugcucagagcaaggcucgaa

SEQ ID NO: 5010 - RNA, 32 nt, Artificial Sequence
  Synthetic
cagaaccuccaugcucagagcaaggcucgaau

SEQ ID NO: 5011 - RNA, 32 nt, Artificial Sequence
  Synthetic
agaaccuccaugcucagagcaaggcucgaauc

SEQ ID NO: 5012 - RNA, 32 nt, Artificial Sequence
  Synthetic
gaaccuccaugcucagagcaaggcucgaaucc

SEQ ID NO: 5013 - RNA, 32 nt, Artificial Sequence
  Synthetic
aaccuccaugcucagagcaaggcucgaaucca

SEQ ID NO: 5014 - RNA, 32 nt, Artificial Sequence
  Synthetic
accuccaugcucagagcaaggcucgaauccag

SEQ ID NO: 5015 - RNA, 32 nt, Artificial Sequence
  Synthetic
ccuccaugcucagagcaaggcucgaauccagg

SEQ ID NO: 5016 - RNA, 32 nt, Artificial Sequence
  Synthetic
cuccaugcucagagcaaggcucgaauccagga

SEQ ID NO: 5017 - RNA, 32 nt, Artificial Sequence
  Synthetic
uccaugcucagagcaaggcucgaauccaggag

SEQ ID NO: 5018 - RNA, 32 nt, Artificial Sequence
  Synthetic
ccaugcucagagcaaggcucgaauccaggagu

SEQ ID NO: 5019 - RNA, 32 nt, Artificial Sequence
  Synthetic
caugcucagagcaaggcucgaauccaggaguu

SEQ ID NO: 5020 - RNA, 32 nt, Artificial Sequence
  Synthetic
augcucagagcaaggcucgaauccaggaguuu

SEQ ID NO: 5021 - RNA, 32 nt, Artificial Sequence
  Synthetic
ugcucagagcaaggcucgaauccaggaguuug

SEQ ID NO: 5022 - RNA, 32 nt, Artificial Sequence
  Synthetic
gcucagagcaaggcucgaauccaggaguuugu

SEQ ID NO: 5023 - RNA, 32 nt, Artificial Sequence
  Synthetic
cucagagcaaggcucgaauccaggaguuugug

SEQ ID NO: 5024 - RNA, 32 nt, Artificial Sequence
  Synthetic
ucagagcaaggcucgaauccaggaguuugugc

SEQ ID NO: 5025 - RNA, 32 nt, Artificial Sequence
  Synthetic
cagagcaaggcucgaauccaggaguuugugcg

SEQ ID NO: 5026 - RNA, 32 nt, Artificial Sequence
  Synthetic
agagcaaggcucgaauccaggaguuugugcgg

SEQ ID NO: 5027 - RNA, 32 nt, Artificial Sequence
  Synthetic
gagcaaggcucgaauccaggaguuugugcggg

SEQ ID NO: 5028 - RNA, 32 nt, Artificial Sequence
  Synthetic
agcaaggcucgaauccaggaguuugugcgggg

SEQ ID NO: 5029 - RNA, 32 nt, Artificial Sequence
  Synthetic
gcaaggcucgaauccaggaguuugugcggggc

SEQ ID NO: 5030 - RNA, 32 nt, Artificial Sequence
  Synthetic
caaggcucgaauccaggaguuugugcggggcc

SEQ ID NO: 5031 - RNA, 32 nt, Artificial Sequence
  Synthetic
aaggcucgaauccaggaguuugugcggggcca

SEQ ID NO: 5032 - RNA, 32 nt, Artificial Sequence
  Synthetic
aggcucgaauccaggaguuugugcggggccau

SEQ ID NO: 5033 - RNA, 32 nt, Artificial Sequence
  Synthetic
ggcucgaauccaggaguuugugcggggccauu

SEQ ID NO: 5034 - RNA, 32 nt, Artificial Sequence
  Synthetic
gcucgaauccaggaguuugugcggggccauuu

SEQ ID NO: 5035 - RNA, 32 nt, Artificial Sequence
  Synthetic
cucgaauccaggaguuugugcggggccauuuu

SEQ ID NO: 5036 - RNA, 32 nt, Artificial Sequence
  Synthetic
ucgaauccaggaguuugugcggggccauuuuu

SEQ ID NO: 5037 - RNA, 32 nt, Artificial Sequence
  Synthetic
cgaauccaggaguuugugcggggccauuuuua

SEQ ID NO: 5038 - RNA, 32 nt, Artificial Sequence
  Synthetic
gaauccaggaguuugugcggggccauuuuuau

SEQ ID NO: 5039 - RNA, 32 nt, Artificial Sequence
  Synthetic
aauccaggaguuugugcggggccauuuuuaug

SEQ ID NO: 5040 - RNA, 32 nt, Artificial Sequence
  Synthetic
auccaggaguuugugcggggccauuuuuaugg

SEQ ID NO: 5041 - RNA, 32 nt, Artificial Sequence
  Synthetic
uccaggaguuugugcggggccauuuuuauggg

SEQ ID NO: 5042 - RNA, 32 nt, Artificial Sequence
  Synthetic
ccaggaguuugugcggggccauuuuuaugggc

SEQ ID NO: 5043 - RNA, 32 nt, Artificial Sequence
  Synthetic
caggaguuugugcggggccauuuuuaugggca

SEQ ID NO: 5044 - RNA, 32 nt, Artificial Sequence
  Synthetic
aggaguuugugcggggccauuuuuaugggcau

SEQ ID NO: 5045 - RNA, 32 nt, Artificial Sequence
  Synthetic
ggaguuugugcggggccauuuuuaugggcauc

SEQ ID NO: 5046 - RNA, 32 nt, Artificial Sequence
  Synthetic
gaguuugugcggggccauuuuuaugggcaucu

SEQ ID NO: 5047 - RNA, 32 nt, Artificial Sequence
  Synthetic
aguuugugcggggccauuuuuaugggcaucug

SEQ ID NO: 5048 - RNA, 32 nt, Artificial Sequence
  Synthetic
guuugugcggggccauuuuuaugggcaucugg

SEQ ID NO: 5049 - RNA, 32 nt, Artificial Sequence
  Synthetic
uuugugcggggccauuuuuaugggcaucugga

SEQ ID NO: 5050 - RNA, 32 nt, Artificial Sequence
  Synthetic
uugugcggggccauuuuuaugggcaucuggac

SEQ ID NO: 5051 - RNA, 32 nt, Artificial Sequence
  Synthetic
ugugcggggccauuuuuaugggcaucuggacu

SEQ ID NO: 5052 - RNA, 32 nt, Artificial Sequence
  Synthetic
gugcggggccauuuuuaugggcaucuggacuu

SEQ ID NO: 5053 - RNA, 32 nt, Artificial Sequence
  Synthetic
ugcggggccauuuuuaugggcaucuggacuuc

SEQ ID NO: 5054 - RNA, 32 nt, Artificial Sequence
  Synthetic
gcggggccauuuuuaugggcaucuggacuuca

SEQ ID NO: 5055 - RNA, 32 nt, Artificial Sequence
  Synthetic
cggggccauuuuuaugggcaucuggacuucaa

SEQ ID NO: 5056 - RNA, 32 nt, Artificial Sequence
  Synthetic
ggggccauuuuuaugggcaucuggacuucaac

SEQ ID NO: 5057 - RNA, 32 nt, Artificial Sequence
  Synthetic
gggccauuuuuaugggcaucuggacuucaacu

SEQ ID NO: 5058 - RNA, 32 nt, Artificial Sequence
  Synthetic
ggccauuuuuaugggcaucuggacuucaacuu

SEQ ID NO: 5059 - RNA, 32 nt, Artificial Sequence
  Synthetic
gccauuuuuaugggcaucuggacuucaacuug

SEQ ID NO: 5060 - RNA, 32 nt, Artificial Sequence
  Synthetic
ccauuuuuaugggcaucuggacuucaacuugg

SEQ ID NO: 5061 - RNA, 32 nt, Artificial Sequence
  Synthetic
cauuuuuaugggcaucuggacuucaacuugga

SEQ ID NO: 5062 - RNA, 32 nt, Artificial Sequence
  Synthetic
auuuuuaugggcaucuggacuucaacuuggac

SEQ ID NO: 5063 - RNA, 32 nt, Artificial Sequence
  Synthetic
uuuuuaugggcaucuggacuucaacuuggaca

SEQ ID NO: 5064 - RNA, 32 nt, Artificial Sequence
  Synthetic
uuuuaugggcaucuggacuucaacuuggacaa

SEQ ID NO: 5065 - RNA, 32 nt, Artificial Sequence
  Synthetic
uuuaugggcaucuggacuucaacuuggacaag

SEQ ID NO: 5066 - RNA, 32 nt, Artificial Sequence
  Synthetic
uuaugggcaucuggacuucaacuuggacaaga

SEQ ID NO: 5067 - RNA, 32 nt, Artificial Sequence
  Synthetic
uaugggcaucuggacuucaacuuggacaagac

SEQ ID NO: 5068 - RNA, 32 nt, Artificial Sequence
  Synthetic
augggcaucuggacuucaacuuggacaagacc

SEQ ID NO: 5069 - RNA, 32 nt, Artificial Sequence
  Synthetic
ugggcaucuggacuucaacuuggacaagaccu

SEQ ID NO: 5070 - RNA, 32 nt, Artificial Sequence
  Synthetic
gggcaucuggacuucaacuuggacaagaccuu

SEQ ID NO: 5071 - RNA, 32 nt, Artificial Sequence
  Synthetic
ggcaucuggacuucaacuuggacaagaccuua

SEQ ID NO: 5072 - RNA, 32 nt, Artificial Sequence
  Synthetic
gcaucuggacuucaacuuggacaagaccuuau

SEQ ID NO: 5073 - RNA, 32 nt, Artificial Sequence
  Synthetic
caucuggacuucaacuuggacaagaccuuaua

SEQ ID NO: 5074 - RNA, 32 nt, Artificial Sequence
  Synthetic
aucuggacuucaacuuggacaagaccuuauac

SEQ ID NO: 5075 - RNA, 32 nt, Artificial Sequence
  Synthetic
ucuggacuucaacuuggacaagaccuuauacu

SEQ ID NO: 5076 - RNA, 32 nt, Artificial Sequence
  Synthetic
cuggacuucaacuuggacaagaccuuauacuu

SEQ ID NO: 5077 - RNA, 32 nt, Artificial Sequence
  Synthetic
uggacuucaacuuggacaagaccuuauacuuc

SEQ ID NO: 5078 - RNA, 32 nt, Artificial Sequence
  Synthetic
ggacuucaacuuggacaagaccuuauacuucu

SEQ ID NO: 5079 - RNA, 32 nt, Artificial Sequence
  Synthetic
gacuucaacuuggacaagaccuuauacuucuu

SEQ ID NO: 5080 - RNA, 32 nt, Artificial Sequence
  Synthetic
acuucaacuuggacaagaccuuauacuucuuu

SEQ ID NO: 5081 - RNA, 32 nt, Artificial Sequence
  Synthetic
cuucaacuuggacaagaccuuauacuucuuua

SEQ ID NO: 5082 - RNA, 32 nt, Artificial Sequence
  Synthetic
uucaacuuggacaagaccuuauacuucuuuau

SEQ ID NO: 5083 - RNA, 32 nt, Artificial Sequence
  Synthetic
ucaacuuggacaagaccuuauacuucuuuauc

SEQ ID NO: 5084 - RNA, 32 nt, Artificial Sequence
  Synthetic
caacuuggacaagaccuuauacuucuuuaucg

SEQ ID NO: 5085 - RNA, 32 nt, Artificial Sequence
  Synthetic
aacuuggacaagaccuuauacuucuuuaucgc

SEQ ID NO: 5086 - RNA, 32 nt, Artificial Sequence
  Synthetic
acuuggacaagaccuuauacuucuuuaucgcc

SEQ ID NO: 5087 - RNA, 32 nt, Artificial Sequence
  Synthetic
cuuggacaagaccuuauacuucuuuaucgccg

SEQ ID NO: 5088 - RNA, 32 nt, Artificial Sequence
  Synthetic
uuggacaagaccuuauacuucuuuaucgccgg

SEQ ID NO: 5089 - RNA, 32 nt, Artificial Sequence
  Synthetic
uggacaagaccuuauacuucuuuaucgccggc

SEQ ID NO: 5090 - RNA, 32 nt, Artificial Sequence
  Synthetic
ggacaagaccuuauacuucuuuaucgccggcc

SEQ ID NO: 5091 - RNA, 32 nt, Artificial Sequence
  Synthetic
gacaagaccuuauacuucuuuaucgccggccg

SEQ ID NO: 5092 - RNA, 32 nt, Artificial Sequence
  Synthetic
acaagaccuuauacuucuuuaucgccggccgc

SEQ ID NO: 5093 - RNA, 32 nt, Artificial Sequence
  Synthetic
caagaccuuauacuucuuuaucgccggccgcu

SEQ ID NO: 5094 - RNA, 32 nt, Artificial Sequence
  Synthetic
aagaccuuauacuucuuuaucgccggccgcua

SEQ ID NO: 5095 - RNA, 32 nt, Artificial Sequence
  Synthetic
agaccuuauacuucuuuaucgccggccgcuau

SEQ ID NO: 5096 - RNA, 32 nt, Artificial Sequence
  Synthetic
gaccuuauacuucuuuaucgccggccgcuaug

SEQ ID NO: 5097 - RNA, 32 nt, Artificial Sequence
  Synthetic
accuuauacuucuuuaucgccggccgcuauga

SEQ ID NO: 5098 - RNA, 32 nt, Artificial Sequence
  Synthetic
ccuuauacuucuuuaucgccggccgcuaugag

SEQ ID NO: 5099 - RNA, 32 nt, Artificial Sequence
  Synthetic
cuuauacuucuuuaucgccggccgcuaugagu

SEQ ID NO: 5100 - RNA, 32 nt, Artificial Sequence
  Synthetic
uuauacuucuuuaucgccggccgcuaugaguu

SEQ ID NO: 5101 - RNA, 32 nt, Artificial Sequence
  Synthetic
uauacuucuuuaucgccggccgcuaugaguuc

SEQ ID NO: 5102 - RNA, 32 nt, Artificial Sequence
  Synthetic
auacuucuuuaucgccggccgcuaugaguucu

SEQ ID NO: 5103 - RNA, 32 nt, Artificial Sequence
  Synthetic
uacuucuuuaucgccggccgcuaugaguucuc

SEQ ID NO: 5104 - RNA, 32 nt, Artificial Sequence
  Synthetic
acuucuuuaucgccggccgcuaugaguucucc

SEQ ID NO: 5105 - RNA, 32 nt, Artificial Sequence
  Synthetic
cuucuuuaucgccggccgcuaugaguucucca

SEQ ID NO: 5106 - RNA, 32 nt, Artificial Sequence
  Synthetic
uucuuuaucgccggccgcuaugaguucuccaa

SEQ ID NO: 5107 - RNA, 32 nt, Artificial Sequence
  Synthetic
ucuuuaucgccggccgcuaugaguucuccaac

SEQ ID NO: 5108 - RNA, 32 nt, Artificial Sequence
  Synthetic
cuuuaucgccggccgcuaugaguucuccaaca

SEQ ID NO: 5109 - RNA, 32 nt, Artificial Sequence
  Synthetic
uuuaucgccggccgcuaugaguucuccaacaa

SEQ ID NO: 5110 - RNA, 32 nt, Artificial Sequence
  Synthetic
uuaucgccggccgcuaugaguucuccaacaag

SEQ ID NO: 5111 - RNA, 32 nt, Artificial Sequence
  Synthetic
uaucgccggccgcuaugaguucuccaacaagg

SEQ ID NO: 5112 - RNA, 32 nt, Artificial Sequence
  Synthetic
aucgccggccgcuaugaguucuccaacaaggg

SEQ ID NO: 5113 - RNA, 32 nt, Artificial Sequence
  Synthetic
ucgccggccgcuaugaguucuccaacaagggu

SEQ ID NO: 5114 - RNA, 32 nt, Artificial Sequence
  Synthetic
cgccggccgcuaugaguucuccaacaagggug

SEQ ID NO: 5115 - RNA, 32 nt, Artificial Sequence
  Synthetic
gccggccgcuaugaguucuccaacaagggugc

SEQ ID NO: 5116 - RNA, 32 nt, Artificial Sequence
  Synthetic
ccggccgcuaugaguucuccaacaagggugcu

SEQ ID NO: 5117 - RNA, 32 nt, Artificial Sequence
  Synthetic
cggccgcuaugaguucuccaacaagggugcug

SEQ ID NO: 5118 - RNA, 32 nt, Artificial Sequence
  Synthetic
ggccgcuaugaguucuccaacaagggugcuga

SEQ ID NO: 5119 - RNA, 32 nt, Artificial Sequence
  Synthetic
gccgcuaugaguucuccaacaagggugcugac

SEQ ID NO: 5120 - RNA, 32 nt, Artificial Sequence
  Synthetic
ccgcuaugaguucuccaacaagggugcugacg

SEQ ID NO: 5121 - RNA, 32 nt, Artificial Sequence
  Synthetic
cgcuaugaguucuccaacaagggugcugacgu

SEQ ID NO: 5122 - RNA, 32 nt, Artificial Sequence
  Synthetic
gcuaugaguucuccaacaagggugcugacguc

SEQ ID NO: 5123 - RNA, 32 nt, Artificial Sequence
  Synthetic
cuaugaguucuccaacaagggugcugacgucu

SEQ ID NO: 5124 - RNA, 32 nt, Artificial Sequence
  Synthetic
uaugaguucuccaacaagggugcugacgucuu

SEQ ID NO: 5125 - RNA, 32 nt, Artificial Sequence
  Synthetic
augaguucuccaacaagggugcugacgucuuc

SEQ ID NO: 5126 - RNA, 32 nt, Artificial Sequence
  Synthetic
ugaguucuccaacaagggugcugacgucuucc

SEQ ID NO: 5127 - RNA, 32 nt, Artificial Sequence
  Synthetic
gaguucuccaacaagggugcugacgucuuccu

SEQ ID NO: 5128 - RNA, 32 nt, Artificial Sequence
  Synthetic
aguucuccaacaagggugcugacgucuuccug

SEQ ID NO: 5129 - RNA, 32 nt, Artificial Sequence
  Synthetic
guucuccaacaagggugcugacgucuuccugg

SEQ ID NO: 5130 - RNA, 32 nt, Artificial Sequence
  Synthetic
uucuccaacaagggugcugacgucuuccugga

SEQ ID NO: 5131 - RNA, 32 nt, Artificial Sequence
  Synthetic
ucuccaacaagggugcugacgucuuccuggag

SEQ ID NO: 5132 - RNA, 32 nt, Artificial Sequence
  Synthetic
cuccaacaagggugcugacgucuuccuggagg

SEQ ID NO: 5133 - RNA, 32 nt, Artificial Sequence
  Synthetic
uccaacaagggugcugacgucuuccuggaggc

SEQ ID NO: 5134 - RNA, 32 nt, Artificial Sequence
  Synthetic
ccaacaagggugcugacgucuuccuggaggca

SEQ ID NO: 5135 - RNA, 32 nt, Artificial Sequence
  Synthetic
caacaagggugcugacgucuuccuggaggcau

SEQ ID NO: 5136 - RNA, 32 nt, Artificial Sequence
  Synthetic
aacaagggugcugacgucuuccuggaggcauu

SEQ ID NO: 5137 - RNA, 32 nt, Artificial Sequence
  Synthetic
acaagggugcugacgucuuccuggaggcauug

SEQ ID NO: 5138 - RNA, 32 nt, Artificial Sequence
  Synthetic
caagggugcugacgucuuccuggaggcauugg

SEQ ID NO: 5139 - RNA, 32 nt, Artificial Sequence
  Synthetic
aagggugcugacgucuuccuggaggcauuggc

SEQ ID NO: 5140 - RNA, 32 nt, Artificial Sequence
  Synthetic
agggugcugacgucuuccuggaggcauuggcu

SEQ ID NO: 5141 - RNA, 32 nt, Artificial Sequence
  Synthetic
gggugcugacgucuuccuggaggcauuggcuc

SEQ ID NO: 5142 - RNA, 32 nt, Artificial Sequence
  Synthetic
ggugcugacgucuuccuggaggcauuggcucg

SEQ ID NO: 5143 - RNA, 32 nt, Artificial Sequence
  Synthetic
gugcugacgucuuccuggaggcauuggcucgg

SEQ ID NO: 5144 - RNA, 32 nt, Artificial Sequence
  Synthetic
ugcugacgucuuccuggaggcauuggcucggc

SEQ ID NO: 5145 - RNA, 32 nt, Artificial Sequence
  Synthetic
gcugacgucuuccuggaggcauuggcucggcu

SEQ ID NO: 5146 - RNA, 32 nt, Artificial Sequence
  Synthetic
cugacgucuuccuggaggcauuggcucggcuc

SEQ ID NO: 5147 - RNA, 32 nt, Artificial Sequence
  Synthetic
ugacgucuuccuggaggcauuggcucggcuca

SEQ ID NO: 5148 - RNA, 32 nt, Artificial Sequence
  Synthetic
gacgucuuccuggaggcauuggcucggcucaa

SEQ ID NO: 5149 - RNA, 32 nt, Artificial Sequence
  Synthetic
acgucuuccuggaggcauuggcucggcucaac

SEQ ID NO: 5150 - RNA, 32 nt, Artificial Sequence
  Synthetic
cgucuuccuggaggcauuggcucggcucaacu

SEQ ID NO: 5151 - RNA, 32 nt, Artificial Sequence
  Synthetic
gucuuccuggaggcauuggcucggcucaacua

SEQ ID NO: 5152 - RNA, 32 nt, Artificial Sequence
  Synthetic
ucuuccuggaggcauuggcucggcucaacuau

SEQ ID NO: 5153 - RNA, 32 nt, Artificial Sequence
  Synthetic
cuuccuggaggcauuggcucggcucaacuauc

SEQ ID NO: 5154 - RNA, 32 nt, Artificial Sequence
  Synthetic
uuccuggaggcauuggcucggcucaacuaucu

SEQ ID NO: 5155 - RNA, 32 nt, Artificial Sequence
  Synthetic
uccuggaggcauuggcucggcucaacuaucug

SEQ ID NO: 5156 - RNA, 32 nt, Artificial Sequence
  Synthetic
ccuggaggcauuggcucggcucaacuaucugc

SEQ ID NO: 5157 - RNA, 32 nt, Artificial Sequence
  Synthetic
cuggaggcauuggcucggcucaacuaucugcu

SEQ ID NO: 5158 - RNA, 32 nt, Artificial Sequence
  Synthetic
uggaggcauuggcucggcucaacuaucugcuc

SEQ ID NO: 5159 - RNA, 32 nt, Artificial Sequence
  Synthetic
ggaggcauuggcucggcucaacuaucugcuca

SEQ ID NO: 5160 - RNA, 32 nt, Artificial Sequence
  Synthetic
gaggcauuggcucggcucaacuaucugcucag

SEQ ID NO: 5161 - RNA, 32 nt, Artificial Sequence
  Synthetic
aggcauuggcucggcucaacuaucugcucaga

SEQ ID NO: 5162 - RNA, 32 nt, Artificial Sequence
  Synthetic
ggcauuggcucggcucaacuaucugcucagag

SEQ ID NO: 5163 - RNA, 32 nt, Artificial Sequence
  Synthetic
gcauuggcucggcucaacuaucugcucagagu

SEQ ID NO: 5164 - RNA, 32 nt, Artificial Sequence
  Synthetic
cauuggcucggcucaacuaucugcucagagug

SEQ ID NO: 5165 - RNA, 32 nt, Artificial Sequence
  Synthetic
auuggcucggcucaacuaucugcucagaguga

SEQ ID NO: 5166 - RNA, 32 nt, Artificial Sequence
  Synthetic
uuggcucggcucaacuaucugcucagagugaa

SEQ ID NO: 5167 - RNA, 32 nt, Artificial Sequence
  Synthetic
uggcucggcucaacuaucugcucagagugaac

SEQ ID NO: 5168 - RNA, 32 nt, Artificial Sequence
  Synthetic
ggcucggcucaacuaucugcucagagugaacg

SEQ ID NO: 5169 - RNA, 32 nt, Artificial Sequence
  Synthetic
gcucggcucaacuaucugcucagagugaacgg

SEQ ID NO: 5170 - RNA, 32 nt, Artificial Sequence
  Synthetic
cucggcucaacuaucugcucagagugaacggc

SEQ ID NO: 5171 - RNA, 32 nt, Artificial Sequence
  Synthetic
ucggcucaacuaucugcucagagugaacggca

SEQ ID NO: 5172 - RNA, 32 nt, Artificial Sequence
  Synthetic
cggcucaacuaucugcucagagugaacggcag

SEQ ID NO: 5173 - RNA, 32 nt, Artificial Sequence
  Synthetic
ggcucaacuaucugcucagagugaacggcagc

SEQ ID NO: 5174 - RNA, 32 nt, Artificial Sequence
  Synthetic
gcucaacuaucugcucagagugaacggcagcg

SEQ ID NO: 5175 - RNA, 32 nt, Artificial Sequence
  Synthetic
cucaacuaucugcucagagugaacggcagcga

SEQ ID NO: 5176 - RNA, 32 nt, Artificial Sequence
  Synthetic
ucaacuaucugcucagagugaacggcagcgag

SEQ ID NO: 5177 - RNA, 32 nt, Artificial Sequence
  Synthetic
caacuaucugcucagagugaacggcagcgagc

SEQ ID NO: 5178 - RNA, 32 nt, Artificial Sequence
  Synthetic
aacuaucugcucagagugaacggcagcgagca

SEQ ID NO: 5179 - RNA, 32 nt, Artificial Sequence
  Synthetic
acuaucugcucagagugaacggcagcgagcag

SEQ ID NO: 5180 - RNA, 32 nt, Artificial Sequence
  Synthetic
cuaucugcucagagugaacggcagcgagcaga

SEQ ID NO: 5181 - RNA, 32 nt, Artificial Sequence
  Synthetic
uaucugcucagagugaacggcagcgagcagac

SEQ ID NO: 5182 - RNA, 32 nt, Artificial Sequence
  Synthetic
aucugcucagagugaacggcagcgagcagaca

SEQ ID NO: 5183 - RNA, 32 nt, Artificial Sequence
  Synthetic
ucugcucagagugaacggcagcgagcagacag

SEQ ID NO: 5184 - RNA, 32 nt, Artificial Sequence
  Synthetic
cugcucagagugaacggcagcgagcagacagu

SEQ ID NO: 5185 - RNA, 32 nt, Artificial Sequence
  Synthetic
ugcucagagugaacggcagcgagcagacagug

SEQ ID NO: 5186 - RNA, 32 nt, Artificial Sequence
  Synthetic
gcucagagugaacggcagcgagcagacagugg

SEQ ID NO: 5187 - RNA, 32 nt, Artificial Sequence
  Synthetic
cucagagugaacggcagcgagcagacaguggu

SEQ ID NO: 5188 - RNA, 32 nt, Artificial Sequence
  Synthetic
ucagagugaacggcagcgagcagacagugguu

SEQ ID NO: 5189 - RNA, 32 nt, Artificial Sequence
  Synthetic
cagagugaacggcagcgagcagacagugguug

SEQ ID NO: 5190 - RNA, 32 nt, Artificial Sequence
  Synthetic
agagugaacggcagcgagcagacagugguugc

SEQ ID NO: 5191 - RNA, 32 nt, Artificial Sequence
  Synthetic
gagugaacggcagcgagcagacagugguugcc

SEQ ID NO: 5192 - RNA, 32 nt, Artificial Sequence
  Synthetic
agugaacggcagcgagcagacagugguugccu

SEQ ID NO: 5193 - RNA, 32 nt, Artificial Sequence
  Synthetic
gugaacggcagcgagcagacagugguugccuu

SEQ ID NO: 5194 - RNA, 32 nt, Artificial Sequence
  Synthetic
ugaacggcagcgagcagacagugguugccuuc

SEQ ID NO: 5195 - RNA, 32 nt, Artificial Sequence
  Synthetic
gaacggcagcgagcagacagugguugccuucu

SEQ ID NO: 5196 - RNA, 32 nt, Artificial Sequence
  Synthetic
aacggcagcgagcagacagugguugccuucuu

SEQ ID NO: 5197 - RNA, 32 nt, Artificial Sequence
  Synthetic
acggcagcgagcagacagugguugccuucuuc

SEQ ID NO: 5198 - RNA, 32 nt, Artificial Sequence
  Synthetic
cggcagcgagcagacagugguugccuucuuca

SEQ ID NO: 5199 - RNA, 32 nt, Artificial Sequence
  Synthetic
ggcagcgagcagacagugguugccuucuucau

SEQ ID NO: 5200 - RNA, 32 nt, Artificial Sequence
  Synthetic
gcagcgagcagacagugguugccuucuucauc

SEQ ID NO: 5201 - RNA, 32 nt, Artificial Sequence
  Synthetic
cagcgagcagacagugguugccuucuucauca

SEQ ID NO: 5202 - RNA, 32 nt, Artificial Sequence
  Synthetic
agcgagcagacagugguugccuucuucaucau

SEQ ID NO: 5203 - RNA, 32 nt, Artificial Sequence
  Synthetic
gcgagcagacagugguugccuucuucaucaug

SEQ ID NO: 5204 - RNA, 32 nt, Artificial Sequence
  Synthetic
cgagcagacagugguugccuucuucaucaugc

SEQ ID NO: 5205 - RNA, 32 nt, Artificial Sequence
  Synthetic
gagcagacagugguugccuucuucaucaugcc

SEQ ID NO: 5206 - RNA, 32 nt, Artificial Sequence
  Synthetic
agcagacagugguugccuucuucaucaugcca

SEQ ID NO: 5207 - RNA, 32 nt, Artificial Sequence
  Synthetic
gcagacagugguugccuucuucaucaugccag

SEQ ID NO: 5208 - RNA, 32 nt, Artificial Sequence
  Synthetic
cagacagugguugccuucuucaucaugccagc

SEQ ID NO: 5209 - RNA, 32 nt, Artificial Sequence
  Synthetic
agacagugguugccuucuucaucaugccagcg

SEQ ID NO: 5210 - RNA, 32 nt, Artificial Sequence
  Synthetic
gacagugguugccuucuucaucaugccagcgc

SEQ ID NO: 5211 - RNA, 32 nt, Artificial Sequence
  Synthetic
acagugguugccuucuucaucaugccagcgcg

SEQ ID NO: 5212 - RNA, 32 nt, Artificial Sequence
  Synthetic
cagugguugccuucuucaucaugccagcgcgg

SEQ ID NO: 5213 - RNA, 32 nt, Artificial Sequence
  Synthetic
agugguugccuucuucaucaugccagcgcgga

SEQ ID NO: 5214 - RNA, 32 nt, Artificial Sequence
  Synthetic
gugguugccuucuucaucaugccagcgcggac

SEQ ID NO: 5215 - RNA, 32 nt, Artificial Sequence
  Synthetic
ugguugccuucuucaucaugccagcgcggacc

SEQ ID NO: 5216 - RNA, 32 nt, Artificial Sequence
  Synthetic
gguugccuucuucaucaugccagcgcggacca

SEQ ID NO: 5217 - RNA, 32 nt, Artificial Sequence
  Synthetic
guugccuucuucaucaugccagcgcggaccaa

SEQ ID NO: 5218 - RNA, 32 nt, Artificial Sequence
  Synthetic
uugccuucuucaucaugccagcgcggaccaac

SEQ ID NO: 5219 - RNA, 32 nt, Artificial Sequence
  Synthetic
ugccuucuucaucaugccagcgcggaccaaca

SEQ ID NO: 5220 - RNA, 32 nt, Artificial Sequence
  Synthetic
gccuucuucaucaugccagcgcggaccaacaa

SEQ ID NO: 5221 - RNA, 32 nt, Artificial Sequence
  Synthetic
ccuucuucaucaugccagcgcggaccaacaau

SEQ ID NO: 5222 - RNA, 32 nt, Artificial Sequence
  Synthetic
cuucuucaucaugccagcgcggaccaacaauu

SEQ ID NO: 5223 - RNA, 32 nt, Artificial Sequence
  Synthetic
uucuucaucaugccagcgcggaccaacaauuu

SEQ ID NO: 5224 - RNA, 32 nt, Artificial Sequence
  Synthetic
ucuucaucaugccagcgcggaccaacaauuuc

SEQ ID NO: 5225 - RNA, 32 nt, Artificial Sequence
  Synthetic
cuucaucaugccagcgcggaccaacaauuuca

SEQ ID NO: 5226 - RNA, 32 nt, Artificial Sequence
  Synthetic
uucaucaugccagcgcggaccaacaauuucaa

SEQ ID NO: 5227 - RNA, 32 nt, Artificial Sequence
  Synthetic
ucaucaugccagcgcggaccaacaauuucaac

SEQ ID NO: 5228 - RNA, 32 nt, Artificial Sequence
  Synthetic
caucaugccagcgcggaccaacaauuucaacg

SEQ ID NO: 5229 - RNA, 32 nt, Artificial Sequence
  Synthetic
aucaugccagcgcggaccaacaauuucaacgu

SEQ ID NO: 5230 - RNA, 32 nt, Artificial Sequence
  Synthetic
ucaugccagcgcggaccaacaauuucaacgug

SEQ ID NO: 5231 - RNA, 32 nt, Artificial Sequence
  Synthetic
caugccagcgcggaccaacaauuucaacgugg

SEQ ID NO: 5232 - RNA, 32 nt, Artificial Sequence
  Synthetic
augccagcgcggaccaacaauuucaacgugga

SEQ ID NO: 5233 - RNA, 32 nt, Artificial Sequence
  Synthetic
ugccagcgcggaccaacaauuucaacguggaa

SEQ ID NO: 5234 - RNA, 32 nt, Artificial Sequence
  Synthetic
gccagcgcggaccaacaauuucaacguggaaa

SEQ ID NO: 5235 - RNA, 32 nt, Artificial Sequence
  Synthetic
ccagcgcggaccaacaauuucaacguggaaac

SEQ ID NO: 5236 - RNA, 32 nt, Artificial Sequence
  Synthetic
cagcgcggaccaacaauuucaacguggaaacc

SEQ ID NO: 5237 - RNA, 32 nt, Artificial Sequence
  Synthetic
agcgcggaccaacaauuucaacguggaaaccc

SEQ ID NO: 5238 - RNA, 32 nt, Artificial Sequence
  Synthetic
gcgcggaccaacaauuucaacguggaaacccu

SEQ ID NO: 5239 - RNA, 32 nt, Artificial Sequence
  Synthetic
cgcggaccaacaauuucaacguggaaacccuc

SEQ ID NO: 5240 - RNA, 32 nt, Artificial Sequence
  Synthetic
gcggaccaacaauuucaacguggaaacccuca

SEQ ID NO: 5241 - RNA, 32 nt, Artificial Sequence
  Synthetic
cggaccaacaauuucaacguggaaacccucaa

SEQ ID NO: 5242 - RNA, 32 nt, Artificial Sequence
  Synthetic
ggaccaacaauuucaacguggaaacccucaaa

SEQ ID NO: 5243 - RNA, 32 nt, Artificial Sequence
  Synthetic
gaccaacaauuucaacguggaaacccucaaag

SEQ ID NO: 5244 - RNA, 32 nt, Artificial Sequence
  Synthetic
accaacaauuucaacguggaaacccucaaagg

SEQ ID NO: 5245 - RNA, 32 nt, Artificial Sequence
  Synthetic
ccaacaauuucaacguggaaacccucaaaggc

SEQ ID NO: 5246 - RNA, 32 nt, Artificial Sequence
  Synthetic
caacaauuucaacguggaaacccucaaaggcc

SEQ ID NO: 5247 - RNA, 32 nt, Artificial Sequence
  Synthetic
aacaauuucaacguggaaacccucaaaggcca

SEQ ID NO: 5248 - RNA, 32 nt, Artificial Sequence
  Synthetic
acaauuucaacguggaaacccucaaaggccaa

SEQ ID NO: 5249 - RNA, 32 nt, Artificial Sequence
  Synthetic
caauuucaacguggaaacccucaaaggccaag

SEQ ID NO: 5250 - RNA, 32 nt, Artificial Sequence
  Synthetic
aauuucaacguggaaacccucaaaggccaagc

SEQ ID NO: 5251 - RNA, 32 nt, Artificial Sequence
  Synthetic
auuucaacguggaaacccucaaaggccaagcu

SEQ ID NO: 5252 - RNA, 32 nt, Artificial Sequence
  Synthetic
uuucaacguggaaacccucaaaggccaagcug

SEQ ID NO: 5253 - RNA, 32 nt, Artificial Sequence
  Synthetic
uucaacguggaaacccucaaaggccaagcugu

SEQ ID NO: 5254 - RNA, 32 nt, Artificial Sequence
  Synthetic
ucaacguggaaacccucaaaggccaagcugug

SEQ ID NO: 5255 - RNA, 32 nt, Artificial Sequence
  Synthetic
caacguggaaacccucaaaggccaagcugugc

SEQ ID NO: 5256 - RNA, 32 nt, Artificial Sequence
  Synthetic
aacguggaaacccucaaaggccaagcugugcg

SEQ ID NO: 5257 - RNA, 32 nt, Artificial Sequence
  Synthetic
acguggaaacccucaaaggccaagcugugcgc

SEQ ID NO: 5258 - RNA, 32 nt, Artificial Sequence
  Synthetic
cguggaaacccucaaaggccaagcugugcgca

SEQ ID NO: 5259 - RNA, 32 nt, Artificial Sequence
  Synthetic
guggaaacccucaaaggccaagcugugcgcaa

SEQ ID NO: 5260 - RNA, 32 nt, Artificial Sequence
  Synthetic
uggaaacccucaaaggccaagcugugcgcaaa

SEQ ID NO: 5261 - RNA, 32 nt, Artificial Sequence
  Synthetic
ggaaacccucaaaggccaagcugugcgcaaac

SEQ ID NO: 5262 - RNA, 32 nt, Artificial Sequence
  Synthetic
gaaacccucaaaggccaagcugugcgcaaaca

SEQ ID NO: 5263 - RNA, 32 nt, Artificial Sequence
  Synthetic
aaacccucaaaggccaagcugugcgcaaacag

SEQ ID NO: 5264 - RNA, 32 nt, Artificial Sequence
  Synthetic
aacccucaaaggccaagcugugcgcaaacagc

SEQ ID NO: 5265 - RNA, 32 nt, Artificial Sequence
  Synthetic
acccucaaaggccaagcugugcgcaaacagcu

SEQ ID NO: 5266 - RNA, 32 nt, Artificial Sequence
  Synthetic
cccucaaaggccaagcugugcgcaaacagcuu

SEQ ID NO: 5267 - RNA, 32 nt, Artificial Sequence
  Synthetic
ccucaaaggccaagcugugcgcaaacagcuuu

SEQ ID NO: 5268 - RNA, 32 nt, Artificial Sequence
  Synthetic
cucaaaggccaagcugugcgcaaacagcuuug

SEQ ID NO: 5269 - RNA, 32 nt, Artificial Sequence
  Synthetic
ucaaaggccaagcugugcgcaaacagcuuugg

SEQ ID NO: 5270 - RNA, 32 nt, Artificial Sequence
  Synthetic
caaaggccaagcugugcgcaaacagcuuuggg

SEQ ID NO: 5271 - RNA, 32 nt, Artificial Sequence
  Synthetic
aaaggccaagcugugcgcaaacagcuuuggga

SEQ ID NO: 5272 - RNA, 32 nt, Artificial Sequence
  Synthetic
aaggccaagcugugcgcaaacagcuuugggac

SEQ ID NO: 5273 - RNA, 32 nt, Artificial Sequence
  Synthetic
aggccaagcugugcgcaaacagcuuugggaca

SEQ ID NO: 5274 - RNA, 32 nt, Artificial Sequence
  Synthetic
ggccaagcugugcgcaaacagcuuugggacac

SEQ ID NO: 5275 - RNA, 32 nt, Artificial Sequence
  Synthetic
gccaagcugugcgcaaacagcuuugggacacg

SEQ ID NO: 5276 - RNA, 32 nt, Artificial Sequence
  Synthetic
ccaagcugugcgcaaacagcuuugggacacgg

SEQ ID NO: 5277 - RNA, 32 nt, Artificial Sequence
  Synthetic
caagcugugcgcaaacagcuuugggacacggc

SEQ ID NO: 5278 - RNA, 32 nt, Artificial Sequence
  Synthetic
aagcugugcgcaaacagcuuugggacacggcc

SEQ ID NO: 5279 - RNA, 32 nt, Artificial Sequence
  Synthetic
agcugugcgcaaacagcuuugggacacggcca

SEQ ID NO: 5280 - RNA, 32 nt, Artificial Sequence
  Synthetic
gcugugcgcaaacagcuuugggacacggccaa

SEQ ID NO: 5281 - RNA, 32 nt, Artificial Sequence
  Synthetic
cugugcgcaaacagcuuugggacacggccaac

SEQ ID NO: 5282 - RNA, 32 nt, Artificial Sequence
  Synthetic
ugugcgcaaacagcuuugggacacggccaaca

SEQ ID NO: 5283 - RNA, 32 nt, Artificial Sequence
  Synthetic
gugcgcaaacagcuuugggacacggccaacac

SEQ ID NO: 5284 - RNA, 32 nt, Artificial Sequence
  Synthetic
ugcgcaaacagcuuugggacacggccaacacg

SEQ ID NO: 5285 - RNA, 32 nt, Artificial Sequence
  Synthetic
gcgcaaacagcuuugggacacggccaacacgg

SEQ ID NO: 5286 - RNA, 32 nt, Artificial Sequence
  Synthetic
cgcaaacagcuuugggacacggccaacacggu

SEQ ID NO: 5287 - RNA, 32 nt, Artificial Sequence
  Synthetic
gcaaacagcuuugggacacggccaacacggug

SEQ ID NO: 5288 - RNA, 32 nt, Artificial Sequence
  Synthetic
caaacagcuuugggacacggccaacacgguga

SEQ ID NO: 5289 - RNA, 32 nt, Artificial Sequence
  Synthetic
aaacagcuuugggacacggccaacacggugaa

SEQ ID NO: 5290 - RNA, 32 nt, Artificial Sequence
  Synthetic
aacagcuuugggacacggccaacacggugaag

SEQ ID NO: 5291 - RNA, 32 nt, Artificial Sequence
  Synthetic
acagcuuugggacacggccaacacggugaagg

SEQ ID NO: 5292 - RNA, 32 nt, Artificial Sequence
  Synthetic
cagcuuugggacacggccaacacggugaagga

SEQ ID NO: 5293 - RNA, 32 nt, Artificial Sequence
  Synthetic
agcuuugggacacggccaacacggugaaggaa

SEQ ID NO: 5294 - RNA, 32 nt, Artificial Sequence
  Synthetic
gcuuugggacacggccaacacggugaaggaaa

SEQ ID NO: 5295 - RNA, 32 nt, Artificial Sequence
  Synthetic
cuuugggacacggccaacacggugaaggaaaa

SEQ ID NO: 5296 - RNA, 32 nt, Artificial Sequence
  Synthetic
uuugggacacggccaacacggugaaggaaaag

SEQ ID NO: 5297 - RNA, 32 nt, Artificial Sequence
  Synthetic
uugggacacggccaacacggugaaggaaaagu

SEQ ID NO: 5298 - RNA, 32 nt, Artificial Sequence
  Synthetic
ugggacacggccaacacggugaaggaaaaguu

SEQ ID NO: 5299 - RNA, 32 nt, Artificial Sequence
  Synthetic
gggacacggccaacacggugaaggaaaaguuc

SEQ ID NO: 5300 - RNA, 32 nt, Artificial Sequence
  Synthetic
ggacacggccaacacggugaaggaaaaguucg

SEQ ID NO: 5301 - RNA, 32 nt, Artificial Sequence
  Synthetic
gacacggccaacacggugaaggaaaaguucgg

SEQ ID NO: 5302 - RNA, 32 nt, Artificial Sequence
  Synthetic
acacggccaacacggugaaggaaaaguucggg

SEQ ID NO: 5303 - RNA, 32 nt, Artificial Sequence
  Synthetic
cacggccaacacggugaaggaaaaguucggga

SEQ ID NO: 5304 - RNA, 32 nt, Artificial Sequence
  Synthetic
acggccaacacggugaaggaaaaguucgggag

SEQ ID NO: 5305 - RNA, 32 nt, Artificial Sequence
  Synthetic
cggccaacacggugaaggaaaaguucgggagg

SEQ ID NO: 5306 - RNA, 32 nt, Artificial Sequence
  Synthetic
ggccaacacggugaaggaaaaguucgggagga

SEQ ID NO: 5307 - RNA, 32 nt, Artificial Sequence
  Synthetic
gccaacacggugaaggaaaaguucgggaggaa

SEQ ID NO: 5308 - RNA, 32 nt, Artificial Sequence
  Synthetic
ccaacacggugaaggaaaaguucgggaggaag

SEQ ID NO: 5309 - RNA, 32 nt, Artificial Sequence
  Synthetic
caacacggugaaggaaaaguucgggaggaagc

SEQ ID NO: 5310 - RNA, 32 nt, Artificial Sequence
  Synthetic
aacacggugaaggaaaaguucgggaggaagcu

SEQ ID NO: 5311 - RNA, 32 nt, Artificial Sequence
  Synthetic
acacggugaaggaaaaguucgggaggaagcuu

SEQ ID NO: 5312 - RNA, 32 nt, Artificial Sequence
  Synthetic
cacggugaaggaaaaguucgggaggaagcuuu

SEQ ID NO: 5313 - RNA, 32 nt, Artificial Sequence
  Synthetic
acggugaaggaaaaguucgggaggaagcuuua

SEQ ID NO: 5314 - RNA, 32 nt, Artificial Sequence
  Synthetic
cggugaaggaaaaguucgggaggaagcuuuau

SEQ ID NO: 5315 - RNA, 32 nt, Artificial Sequence
  Synthetic
ggugaaggaaaaguucgggaggaagcuuuaug

SEQ ID NO: 5316 - RNA, 32 nt, Artificial Sequence
  Synthetic
gugaaggaaaaguucgggaggaagcuuuauga

SEQ ID NO: 5317 - RNA, 32 nt, Artificial Sequence
  Synthetic
ugaaggaaaaguucgggaggaagcuuuaugaa

SEQ ID NO: 5318 - RNA, 32 nt, Artificial Sequence
  Synthetic
gaaggaaaaguucgggaggaagcuuuaugaau

SEQ ID NO: 5319 - RNA, 32 nt, Artificial Sequence
  Synthetic
aaggaaaaguucgggaggaagcuuuaugaauc

SEQ ID NO: 5320 - RNA, 32 nt, Artificial Sequence
  Synthetic
aggaaaaguucgggaggaagcuuuaugaaucc

SEQ ID NO: 5321 - RNA, 32 nt, Artificial Sequence
  Synthetic
ggaaaaguucgggaggaagcuuuaugaauccu

SEQ ID NO: 5322 - RNA, 32 nt, Artificial Sequence
  Synthetic
gaaaaguucgggaggaagcuuuaugaauccuu

SEQ ID NO: 5323 - RNA, 32 nt, Artificial Sequence
  Synthetic
aaaaguucgggaggaagcuuuaugaauccuua

SEQ ID NO: 5324 - RNA, 32 nt, Artificial Sequence
  Synthetic
aaaguucgggaggaagcuuuaugaauccuuac

SEQ ID NO: 5325 - RNA, 32 nt, Artificial Sequence
  Synthetic
aaguucgggaggaagcuuuaugaauccuuacu

SEQ ID NO: 5326 - RNA, 32 nt, Artificial Sequence
  Synthetic
aguucgggaggaagcuuuaugaauccuuacug

SEQ ID NO: 5327 - RNA, 32 nt, Artificial Sequence
  Synthetic
guucgggaggaagcuuuaugaauccuuacugg

SEQ ID NO: 5328 - RNA, 32 nt, Artificial Sequence
  Synthetic
uucgggaggaagcuuuaugaauccuuacuggu

SEQ ID NO: 5329 - RNA, 32 nt, Artificial Sequence
  Synthetic
ucgggaggaagcuuuaugaauccuuacugguu

SEQ ID NO: 5330 - RNA, 32 nt, Artificial Sequence
  Synthetic
cgggaggaagcuuuaugaauccuuacugguug

SEQ ID NO: 5331 - RNA, 32 nt, Artificial Sequence
  Synthetic
gggaggaagcuuuaugaauccuuacugguugg

SEQ ID NO: 5332 - RNA, 32 nt, Artificial Sequence
  Synthetic
ggaggaagcuuuaugaauccuuacugguuggg

SEQ ID NO: 5333 - RNA, 32 nt, Artificial Sequence
  Synthetic
gaggaagcuuuaugaauccuuacugguuggga

SEQ ID NO: 5334 - RNA, 32 nt, Artificial Sequence
  Synthetic
aggaagcuuuaugaauccuuacugguugggag

SEQ ID NO: 5335 - RNA, 32 nt, Artificial Sequence
  Synthetic
ggaagcuuuaugaauccuuacugguugggagc

SEQ ID NO: 5336 - RNA, 32 nt, Artificial Sequence
  Synthetic
gaagcuuuaugaauccuuacugguugggagcc

SEQ ID NO: 5337 - RNA, 32 nt, Artificial Sequence
  Synthetic
aagcuuuaugaauccuuacugguugggagccu

SEQ ID NO: 5338 - RNA, 32 nt, Artificial Sequence
  Synthetic
agcuuuaugaauccuuacugguugggagccuu

SEQ ID NO: 5339 - RNA, 32 nt, Artificial Sequence
  Synthetic
gcuuuaugaauccuuacugguugggagccuuc

SEQ ID NO: 5340 - RNA, 32 nt, Artificial Sequence
  Synthetic
cuuuaugaauccuuacugguugggagccuucc

SEQ ID NO: 5341 - RNA, 32 nt, Artificial Sequence
  Synthetic
uuuaugaauccuuacugguugggagccuuccc

SEQ ID NO: 5342 - RNA, 32 nt, Artificial Sequence
  Synthetic
uuaugaauccuuacugguugggagccuucccg

SEQ ID NO: 5343 - RNA, 32 nt, Artificial Sequence
  Synthetic
uaugaauccuuacugguugggagccuucccga

SEQ ID NO: 5344 - RNA, 32 nt, Artificial Sequence
  Synthetic
augaauccuuacugguugggagccuucccgac

SEQ ID NO: 5345 - RNA, 32 nt, Artificial Sequence
  Synthetic
ugaauccuuacugguugggagccuucccgaca

SEQ ID NO: 5346 - RNA, 32 nt, Artificial Sequence
  Synthetic
gaauccuuacugguugggagccuucccgacau

SEQ ID NO: 5347 - RNA, 32 nt, Artificial Sequence
  Synthetic
aauccuuacugguugggagccuucccgacaug

SEQ ID NO: 5348 - RNA, 32 nt, Artificial Sequence
  Synthetic
auccuuacugguugggagccuucccgacauga

SEQ ID NO: 5349 - RNA, 32 nt, Artificial Sequence
  Synthetic
uccuuacugguugggagccuucccgacaugaa

SEQ ID NO: 5350 - RNA, 32 nt, Artificial Sequence
  Synthetic
ccuuacugguugggagccuucccgacaugaac

SEQ ID NO: 5351 - RNA, 32 nt, Artificial Sequence
  Synthetic
cuuacugguugggagccuucccgacaugaaca

SEQ ID NO: 5352 - RNA, 32 nt, Artificial Sequence
  Synthetic
uuacugguugggagccuucccgacaugaacaa

SEQ ID NO: 5353 - RNA, 32 nt, Artificial Sequence
  Synthetic
uacugguugggagccuucccgacaugaacaag

SEQ ID NO: 5354 - RNA, 32 nt, Artificial Sequence
  Synthetic
acugguugggagccuucccgacaugaacaaga

SEQ ID NO: 5355 - RNA, 32 nt, Artificial Sequence
  Synthetic
cugguugggagccuucccgacaugaacaagau

SEQ ID NO: 5356 - RNA, 32 nt, Artificial Sequence
  Synthetic
ugguugggagccuucccgacaugaacaagaug

SEQ ID NO: 5357 - RNA, 32 nt, Artificial Sequence
  Synthetic
gguugggagccuucccgacaugaacaagaugc

SEQ ID NO: 5358 - RNA, 32 nt, Artificial Sequence
  Synthetic
guugggagccuucccgacaugaacaagaugcu

SEQ ID NO: 5359 - RNA, 32 nt, Artificial Sequence
  Synthetic
uugggagccuucccgacaugaacaagaugcug

SEQ ID NO: 5360 - RNA, 32 nt, Artificial Sequence
  Synthetic
ugggagccuucccgacaugaacaagaugcugg

SEQ ID NO: 5361 - RNA, 32 nt, Artificial Sequence
  Synthetic
gggagccuucccgacaugaacaagaugcugga

SEQ ID NO: 5362 - RNA, 32 nt, Artificial Sequence
  Synthetic
ggagccuucccgacaugaacaagaugcuggau

SEQ ID NO: 5363 - RNA, 32 nt, Artificial Sequence
  Synthetic
gagccuucccgacaugaacaagaugcuggaua

SEQ ID NO: 5364 - RNA, 32 nt, Artificial Sequence
  Synthetic
agccuucccgacaugaacaagaugcuggauaa

SEQ ID NO: 5365 - RNA, 32 nt, Artificial Sequence
  Synthetic
gccuucccgacaugaacaagaugcuggauaag

SEQ ID NO: 5366 - RNA, 32 nt, Artificial Sequence
  Synthetic
ccuucccgacaugaacaagaugcuggauaagg

SEQ ID NO: 5367 - RNA, 32 nt, Artificial Sequence
  Synthetic
cuucccgacaugaacaagaugcuggauaagga

SEQ ID NO: 5368 - RNA, 32 nt, Artificial Sequence
  Synthetic
uucccgacaugaacaagaugcuggauaaggaa

SEQ ID NO: 5369 - RNA, 32 nt, Artificial Sequence
  Synthetic
ucccgacaugaacaagaugcuggauaaggaag

SEQ ID NO: 5370 - RNA, 32 nt, Artificial Sequence
  Synthetic
cccgacaugaacaagaugcuggauaaggaaga

SEQ ID NO: 5371 - RNA, 32 nt, Artificial Sequence
  Synthetic
ccgacaugaacaagaugcuggauaaggaagac

SEQ ID NO: 5372 - RNA, 32 nt, Artificial Sequence
  Synthetic
cgacaugaacaagaugcuggauaaggaagacu

SEQ ID NO: 5373 - RNA, 32 nt, Artificial Sequence
  Synthetic
gacaugaacaagaugcuggauaaggaagacuu

SEQ ID NO: 5374 - RNA, 32 nt, Artificial Sequence
  Synthetic
acaugaacaagaugcuggauaaggaagacuuc

SEQ ID NO: 5375 - RNA, 32 nt, Artificial Sequence
  Synthetic
caugaacaagaugcuggauaaggaagacuuca

SEQ ID NO: 5376 - RNA, 32 nt, Artificial Sequence
  Synthetic
augaacaagaugcuggauaaggaagacuucac

SEQ ID NO: 5377 - RNA, 32 nt, Artificial Sequence
  Synthetic
ugaacaagaugcuggauaaggaagacuucacu

SEQ ID NO: 5378 - RNA, 32 nt, Artificial Sequence
  Synthetic
gaacaagaugcuggauaaggaagacuucacua

SEQ ID NO: 5379 - RNA, 32 nt, Artificial Sequence
  Synthetic
aacaagaugcuggauaaggaagacuucacuau

SEQ ID NO: 5380 - RNA, 32 nt, Artificial Sequence
  Synthetic
acaagaugcuggauaaggaagacuucacuaug

SEQ ID NO: 5381 - RNA, 32 nt, Artificial Sequence
  Synthetic
caagaugcuggauaaggaagacuucacuauga

SEQ ID NO: 5382 - RNA, 32 nt, Artificial Sequence
  Synthetic
aagaugcuggauaaggaagacuucacuaugau

SEQ ID NO: 5383 - RNA, 32 nt, Artificial Sequence
  Synthetic
agaugcuggauaaggaagacuucacuaugaug

SEQ ID NO: 5384 - RNA, 32 nt, Artificial Sequence
  Synthetic
gaugcuggauaaggaagacuucacuaugauga

SEQ ID NO: 5385 - RNA, 32 nt, Artificial Sequence
  Synthetic
augcuggauaaggaagacuucacuaugaugaa

SEQ ID NO: 5386 - RNA, 32 nt, Artificial Sequence
  Synthetic
ugcuggauaaggaagacuucacuaugaugaag

SEQ ID NO: 5387 - RNA, 32 nt, Artificial Sequence
  Synthetic
gcuggauaaggaagacuucacuaugaugaaga

SEQ ID NO: 5388 - RNA, 32 nt, Artificial Sequence
  Synthetic
cuggauaaggaagacuucacuaugaugaagag

SEQ ID NO: 5389 - RNA, 32 nt, Artificial Sequence
  Synthetic
uggauaaggaagacuucacuaugaugaagaga

SEQ ID NO: 5390 - RNA, 32 nt, Artificial Sequence
  Synthetic
ggauaaggaagacuucacuaugaugaagagag

SEQ ID NO: 5391 - RNA, 32 nt, Artificial Sequence
  Synthetic
gauaaggaagacuucacuaugaugaagagagc

SEQ ID NO: 5392 - RNA, 32 nt, Artificial Sequence
  Synthetic
auaaggaagacuucacuaugaugaagagagcc

SEQ ID NO: 5393 - RNA, 32 nt, Artificial Sequence
  Synthetic
uaaggaagacuucacuaugaugaagagagcca

SEQ ID NO: 5394 - RNA, 32 nt, Artificial Sequence
  Synthetic
aaggaagacuucacuaugaugaagagagccau

SEQ ID NO: 5395 - RNA, 32 nt, Artificial Sequence
  Synthetic
aggaagacuucacuaugaugaagagagccauc

SEQ ID NO: 5396 - RNA, 32 nt, Artificial Sequence
  Synthetic
ggaagacuucacuaugaugaagagagccaucu

SEQ ID NO: 5397 - RNA, 32 nt, Artificial Sequence
  Synthetic
gaagacuucacuaugaugaagagagccaucuu

SEQ ID NO: 5398 - RNA, 32 nt, Artificial Sequence
  Synthetic
aagacuucacuaugaugaagagagccaucuuu

SEQ ID NO: 5399 - RNA, 32 nt, Artificial Sequence
  Synthetic
agacuucacuaugaugaagagagccaucuuug

SEQ ID NO: 5400 - RNA, 32 nt, Artificial Sequence
  Synthetic
gacuucacuaugaugaagagagccaucuuugc

SEQ ID NO: 5401 - RNA, 32 nt, Artificial Sequence
  Synthetic
acuucacuaugaugaagagagccaucuuugca

SEQ ID NO: 5402 - RNA, 32 nt, Artificial Sequence
  Synthetic
cuucacuaugaugaagagagccaucuuugcaa

SEQ ID NO: 5403 - RNA, 32 nt, Artificial Sequence
  Synthetic
uucacuaugaugaagagagccaucuuugcaac

SEQ ID NO: 5404 - RNA, 32 nt, Artificial Sequence
  Synthetic
ucacuaugaugaagagagccaucuuugcaacg

SEQ ID NO: 5405 - RNA, 32 nt, Artificial Sequence
  Synthetic
cacuaugaugaagagagccaucuuugcaacgc

SEQ ID NO: 5406 - RNA, 32 nt, Artificial Sequence
  Synthetic
acuaugaugaagagagccaucuuugcaacgca

SEQ ID NO: 5407 - RNA, 32 nt, Artificial Sequence
  Synthetic
cuaugaugaagagagccaucuuugcaacgcag

SEQ ID NO: 5408 - RNA, 32 nt, Artificial Sequence
  Synthetic
uaugaugaagagagccaucuuugcaacgcagc

SEQ ID NO: 5409 - RNA, 32 nt, Artificial Sequence
  Synthetic
augaugaagagagccaucuuugcaacgcagcg

SEQ ID NO: 5410 - RNA, 32 nt, Artificial Sequence
  Synthetic
ugaugaagagagccaucuuugcaacgcagcgg

SEQ ID NO: 5411 - RNA, 32 nt, Artificial Sequence
  Synthetic
gaugaagagagccaucuuugcaacgcagcggc

SEQ ID NO: 5412 - RNA, 32 nt, Artificial Sequence
  Synthetic
augaagagagccaucuuugcaacgcagcggca

SEQ ID NO: 5413 - RNA, 32 nt, Artificial Sequence
  Synthetic
ugaagagagccaucuuugcaacgcagcggcag

SEQ ID NO: 5414 - RNA, 32 nt, Artificial Sequence
  Synthetic
gaagagagccaucuuugcaacgcagcggcagu

SEQ ID NO: 5415 - RNA, 32 nt, Artificial Sequence
  Synthetic
aagagagccaucuuugcaacgcagcggcaguc

SEQ ID NO: 5416 - RNA, 32 nt, Artificial Sequence
  Synthetic
agagagccaucuuugcaacgcagcggcagucu

SEQ ID NO: 5417 - RNA, 32 nt, Artificial Sequence
  Synthetic
gagagccaucuuugcaacgcagcggcagucuu

SEQ ID NO: 5418 - RNA, 32 nt, Artificial Sequence
  Synthetic
agagccaucuuugcaacgcagcggcagucuuu

SEQ ID NO: 5419 - RNA, 32 nt, Artificial Sequence
  Synthetic
gagccaucuuugcaacgcagcggcagucuuuc

SEQ ID NO: 5420 - RNA, 32 nt, Artificial Sequence
  Synthetic
agccaucuuugcaacgcagcggcagucuuucc

SEQ ID NO: 5421 - RNA, 32 nt, Artificial Sequence
  Synthetic
gccaucuuugcaacgcagcggcagucuuuccc

SEQ ID NO: 5422 - RNA, 32 nt, Artificial Sequence
  Synthetic
ccaucuuugcaacgcagcggcagucuuucccc

SEQ ID NO: 5423 - RNA, 32 nt, Artificial Sequence
  Synthetic
caucuuugcaacgcagcggcagucuuuccccc

SEQ ID NO: 5424 - RNA, 32 nt, Artificial Sequence
  Synthetic
aucuuugcaacgcagcggcagucuuucccccc

SEQ ID NO: 5425 - RNA, 32 nt, Artificial Sequence
  Synthetic
ucuuugcaacgcagcggcagucuuuccccccu

SEQ ID NO: 5426 - RNA, 32 nt, Artificial Sequence
  Synthetic
cuuugcaacgcagcggcagucuuuccccccug

SEQ ID NO: 5427 - RNA, 32 nt, Artificial Sequence
  Synthetic
uuugcaacgcagcggcagucuuuccccccugu

SEQ ID NO: 5428 - RNA, 32 nt, Artificial Sequence
  Synthetic
uugcaacgcagcggcagucuuuccccccugug

SEQ ID NO: 5429 - RNA, 32 nt, Artificial Sequence
  Synthetic
ugcaacgcagcggcagucuuuccccccugugu

SEQ ID NO: 5430 - RNA, 32 nt, Artificial Sequence
  Synthetic
gcaacgcagcggcagucuuuccccccugugug

SEQ ID NO: 5431 - RNA, 32 nt, Artificial Sequence
  Synthetic
caacgcagcggcagucuuuccccccugugugc

SEQ ID NO: 5432 - RNA, 32 nt, Artificial Sequence
  Synthetic
aacgcagcggcagucuuuccccccugugugca

SEQ ID NO: 5433 - RNA, 32 nt, Artificial Sequence
  Synthetic
acgcagcggcagucuuuccccccugugugcac

SEQ ID NO: 5434 - RNA, 32 nt, Artificial Sequence
  Synthetic
cgcagcggcagucuuuccccccugugugcacc

SEQ ID NO: 5435 - RNA, 32 nt, Artificial Sequence
  Synthetic
gcagcggcagucuuuccccccugugugcaccc

SEQ ID NO: 5436 - RNA, 32 nt, Artificial Sequence
  Synthetic
cagcggcagucuuuccccccugugugcaccca

SEQ ID NO: 5437 - RNA, 32 nt, Artificial Sequence
  Synthetic
agcggcagucuuuccccccugugugcacccac

SEQ ID NO: 5438 - RNA, 32 nt, Artificial Sequence
  Synthetic
gcggcagucuuuccccccugugugcacccaca

SEQ ID NO: 5439 - RNA, 32 nt, Artificial Sequence
  Synthetic
cggcagucuuuccccccugugugcacccacaa

SEQ ID NO: 5440 - RNA, 32 nt, Artificial Sequence
  Synthetic
ggcagucuuuccccccugugugcacccacaau

SEQ ID NO: 5441 - RNA, 32 nt, Artificial Sequence
  Synthetic
gcagucuuuccccccugugugcacccacaaua

SEQ ID NO: 5442 - RNA, 32 nt, Artificial Sequence
  Synthetic
cagucuuuccccccugugugcacccacaauau

SEQ ID NO: 5443 - RNA, 32 nt, Artificial Sequence
  Synthetic
agucuuuccccccugugugcacccacaauaug

SEQ ID NO: 5444 - RNA, 32 nt, Artificial Sequence
  Synthetic
gucuuuccccccugugugcacccacaauaugc

SEQ ID NO: 5445 - RNA, 32 nt, Artificial Sequence
  Synthetic
ucuuuccccccugugugcacccacaauaugcu

SEQ ID NO: 5446 - RNA, 32 nt, Artificial Sequence
  Synthetic
cuuuccccccugugugcacccacaauaugcug

SEQ ID NO: 5447 - RNA, 32 nt, Artificial Sequence
  Synthetic
uuuccccccugugugcacccacaauaugcugg

SEQ ID NO: 5448 - RNA, 32 nt, Artificial Sequence
  Synthetic
uuccccccugugugcacccacaauaugcugga

SEQ ID NO: 5449 - RNA, 32 nt, Artificial Sequence
  Synthetic
uccccccugugugcacccacaauaugcuggau

SEQ ID NO: 5450 - RNA, 32 nt, Artificial Sequence
  Synthetic
ccccccugugugcacccacaauaugcuggaug

SEQ ID NO: 5451 - RNA, 32 nt, Artificial Sequence
  Synthetic
cccccugugugcacccacaauaugcuggauga

SEQ ID NO: 5452 - RNA, 32 nt, Artificial Sequence
  Synthetic
ccccugugugcacccacaauaugcuggaugac

SEQ ID NO: 5453 - RNA, 32 nt, Artificial Sequence
  Synthetic
cccugugugcacccacaauaugcuggaugacu

SEQ ID NO: 5454 - RNA, 32 nt, Artificial Sequence
  Synthetic
ccugugugcacccacaauaugcuggaugacuc

SEQ ID NO: 5455 - RNA, 32 nt, Artificial Sequence
  Synthetic
cugugugcacccacaauaugcuggaugacucc

SEQ ID NO: 5456 - RNA, 32 nt, Artificial Sequence
  Synthetic
ugugugcacccacaauaugcuggaugacuccu

SEQ ID NO: 5457 - RNA, 32 nt, Artificial Sequence
  Synthetic
gugugcacccacaauaugcuggaugacuccuc

SEQ ID NO: 5458 - RNA, 32 nt, Artificial Sequence
  Synthetic
ugugcacccacaauaugcuggaugacuccuca

SEQ ID NO: 5459 - RNA, 32 nt, Artificial Sequence
  Synthetic
gugcacccacaauaugcuggaugacuccucag

SEQ ID NO: 5460 - RNA, 32 nt, Artificial Sequence
  Synthetic
ugcacccacaauaugcuggaugacuccucaga

SEQ ID NO: 5461 - RNA, 32 nt, Artificial Sequence
  Synthetic
gcacccacaauaugcuggaugacuccucagac

SEQ ID NO: 5462 - RNA, 32 nt, Artificial Sequence
  Synthetic
cacccacaauaugcuggaugacuccucagacc

SEQ ID NO: 5463 - RNA, 32 nt, Artificial Sequence
  Synthetic
acccacaauaugcuggaugacuccucagaccc

SEQ ID NO: 5464 - RNA, 32 nt, Artificial Sequence
  Synthetic
cccacaauaugcuggaugacuccucagacccc

SEQ ID NO: 5465 - RNA, 32 nt, Artificial Sequence
  Synthetic
ccacaauaugcuggaugacuccucagacccca

SEQ ID NO: 5466 - RNA, 32 nt, Artificial Sequence
  Synthetic
cacaauaugcuggaugacuccucagaccccau

SEQ ID NO: 5467 - RNA, 32 nt, Artificial Sequence
  Synthetic
acaauaugcuggaugacuccucagaccccauc

SEQ ID NO: 5468 - RNA, 32 nt, Artificial Sequence
  Synthetic
caauaugcuggaugacuccucagaccccaucc

SEQ ID NO: 5469 - RNA, 32 nt, Artificial Sequence
  Synthetic
aauaugcuggaugacuccucagaccccauccu

SEQ ID NO: 5470 - RNA, 32 nt, Artificial Sequence
  Synthetic
auaugcuggaugacuccucagaccccauccug

SEQ ID NO: 5471 - RNA, 32 nt, Artificial Sequence
  Synthetic
uaugcuggaugacuccucagaccccauccuga

SEQ ID NO: 5472 - RNA, 32 nt, Artificial Sequence
  Synthetic
augcuggaugacuccucagaccccauccugac

SEQ ID NO: 5473 - RNA, 32 nt, Artificial Sequence
  Synthetic
ugcuggaugacuccucagaccccauccugacc

SEQ ID NO: 5474 - RNA, 32 nt, Artificial Sequence
  Synthetic
gcuggaugacuccucagaccccauccugacca

SEQ ID NO: 5475 - RNA, 32 nt, Artificial Sequence
  Synthetic
cuggaugacuccucagaccccauccugaccac

SEQ ID NO: 5476 - RNA, 32 nt, Artificial Sequence
  Synthetic
uggaugacuccucagaccccauccugaccacc

SEQ ID NO: 5477 - RNA, 32 nt, Artificial Sequence
  Synthetic
ggaugacuccucagaccccauccugaccacca

SEQ ID NO: 5478 - RNA, 32 nt, Artificial Sequence
  Synthetic
gaugacuccucagaccccauccugaccaccau

SEQ ID NO: 5479 - RNA, 32 nt, Artificial Sequence
  Synthetic
augacuccucagaccccauccugaccaccauc

SEQ ID NO: 5480 - RNA, 32 nt, Artificial Sequence
  Synthetic
ugacuccucagaccccauccugaccaccaucc

SEQ ID NO: 5481 - RNA, 32 nt, Artificial Sequence
  Synthetic
gacuccucagaccccauccugaccaccauccg

SEQ ID NO: 5482 - RNA, 32 nt, Artificial Sequence
  Synthetic
acuccucagaccccauccugaccaccauccgc

SEQ ID NO: 5483 - RNA, 32 nt, Artificial Sequence
  Synthetic
cuccucagaccccauccugaccaccauccgcc

SEQ ID NO: 5484 - RNA, 32 nt, Artificial Sequence
  Synthetic
uccucagaccccauccugaccaccauccgccg

SEQ ID NO: 5485 - RNA, 32 nt, Artificial Sequence
  Synthetic
ccucagaccccauccugaccaccauccgccga

SEQ ID NO: 5486 - RNA, 32 nt, Artificial Sequence
  Synthetic
cucagaccccauccugaccaccauccgccgaa

SEQ ID NO: 5487 - RNA, 32 nt, Artificial Sequence
  Synthetic
ucagaccccauccugaccaccauccgccgaau

SEQ ID NO: 5488 - RNA, 32 nt, Artificial Sequence
  Synthetic
cagaccccauccugaccaccauccgccgaauc

SEQ ID NO: 5489 - RNA, 32 nt, Artificial Sequence
  Synthetic
agaccccauccugaccaccauccgccgaaucg

SEQ ID NO: 5490 - RNA, 32 nt, Artificial Sequence
  Synthetic
gaccccauccugaccaccauccgccgaaucgg

SEQ ID NO: 5491 - RNA, 32 nt, Artificial Sequence
  Synthetic
accccauccugaccaccauccgccgaaucggc

SEQ ID NO: 5492 - RNA, 32 nt, Artificial Sequence
  Synthetic
ccccauccugaccaccauccgccgaaucggcc

SEQ ID NO: 5493 - RNA, 32 nt, Artificial Sequence
  Synthetic
cccauccugaccaccauccgccgaaucggccu

SEQ ID NO: 5494 - RNA, 32 nt, Artificial Sequence
  Synthetic
ccauccugaccaccauccgccgaaucggccuc

SEQ ID NO: 5495 - RNA, 32 nt, Artificial Sequence
  Synthetic
cauccugaccaccauccgccgaaucggccucu

SEQ ID NO: 5496 - RNA, 32 nt, Artificial Sequence
  Synthetic
auccugaccaccauccgccgaaucggccucuu

SEQ ID NO: 5497 - RNA, 32 nt, Artificial Sequence
  Synthetic
uccugaccaccauccgccgaaucggccucuuc

SEQ ID NO: 5498 - RNA, 32 nt, Artificial Sequence
  Synthetic
ccugaccaccauccgccgaaucggccucuuca

SEQ ID NO: 5499 - RNA, 32 nt, Artificial Sequence
  Synthetic
cugaccaccauccgccgaaucggccucuucaa

SEQ ID NO: 5500 - RNA, 32 nt, Artificial Sequence
  Synthetic
ugaccaccauccgccgaaucggccucuucaau

SEQ ID NO: 5501 - RNA, 32 nt, Artificial Sequence
  Synthetic
gaccaccauccgccgaaucggccucuucaaua

SEQ ID NO: 5502 - RNA, 32 nt, Artificial Sequence
  Synthetic
accaccauccgccgaaucggccucuucaauag

SEQ ID NO: 5503 - RNA, 32 nt, Artificial Sequence
  Synthetic
ccaccauccgccgaaucggccucuucaauagc

SEQ ID NO: 5504 - RNA, 32 nt, Artificial Sequence
  Synthetic
caccauccgccgaaucggccucuucaauagca

SEQ ID NO: 5505 - RNA, 32 nt, Artificial Sequence
  Synthetic
accauccgccgaaucggccucuucaauagcag

SEQ ID NO: 5506 - RNA, 32 nt, Artificial Sequence
  Synthetic
ccauccgccgaaucggccucuucaauagcagu

SEQ ID NO: 5507 - RNA, 32 nt, Artificial Sequence
  Synthetic
cauccgccgaaucggccucuucaauagcagug

SEQ ID NO: 5508 - RNA, 32 nt, Artificial Sequence
  Synthetic
auccgccgaaucggccucuucaauagcagugc

SEQ ID NO: 5509 - RNA, 32 nt, Artificial Sequence
  Synthetic
uccgccgaaucggccucuucaauagcagugcc

SEQ ID NO: 5510 - RNA, 32 nt, Artificial Sequence
  Synthetic
ccgccgaaucggccucuucaauagcagugccg

SEQ ID NO: 5511 - RNA, 32 nt, Artificial Sequence
  Synthetic
cgccgaaucggccucuucaauagcagugccga

SEQ ID NO: 5512 - RNA, 32 nt, Artificial Sequence
  Synthetic
gccgaaucggccucuucaauagcagugccgac

SEQ ID NO: 5513 - RNA, 32 nt, Artificial Sequence
  Synthetic
ccgaaucggccucuucaauagcagugccgaca

SEQ ID NO: 5514 - RNA, 32 nt, Artificial Sequence
  Synthetic
cgaaucggccucuucaauagcagugccgacag

SEQ ID NO: 5515 - RNA, 32 nt, Artificial Sequence
  Synthetic
gaaucggccucuucaauagcagugccgacagg

SEQ ID NO: 5516 - RNA, 32 nt, Artificial Sequence
  Synthetic
aaucggccucuucaauagcagugccgacaggg

SEQ ID NO: 5517 - RNA, 32 nt, Artificial Sequence
  Synthetic
aucggccucuucaauagcagugccgacagggu

SEQ ID NO: 5518 - RNA, 32 nt, Artificial Sequence
  Synthetic
ucggccucuucaauagcagugccgacagggug

SEQ ID NO: 5519 - RNA, 32 nt, Artificial Sequence
  Synthetic
cggccucuucaauagcagugccgacaggguga

SEQ ID NO: 5520 - RNA, 32 nt, Artificial Sequence
  Synthetic
ggccucuucaauagcagugccgacagggugaa

SEQ ID NO: 5521 - RNA, 32 nt, Artificial Sequence
  Synthetic
gccucuucaauagcagugccgacagggugaag

SEQ ID NO: 5522 - RNA, 32 nt, Artificial Sequence
  Synthetic
ccucuucaauagcagugccgacagggugaagg

SEQ ID NO: 5523 - RNA, 32 nt, Artificial Sequence
  Synthetic
cucuucaauagcagugccgacagggugaaggu

SEQ ID NO: 5524 - RNA, 32 nt, Artificial Sequence
  Synthetic
ucuucaauagcagugccgacagggugaaggug

SEQ ID NO: 5525 - RNA, 32 nt, Artificial Sequence
  Synthetic
cuucaauagcagugccgacagggugaagguga

SEQ ID NO: 5526 - RNA, 32 nt, Artificial Sequence
  Synthetic
uucaauagcagugccgacagggugaaggugau

SEQ ID NO: 5527 - RNA, 32 nt, Artificial Sequence
  Synthetic
ucaauagcagugccgacagggugaaggugauu

SEQ ID NO: 5528 - RNA, 32 nt, Artificial Sequence
  Synthetic
caauagcagugccgacagggugaaggugauuu

SEQ ID NO: 5529 - RNA, 32 nt, Artificial Sequence
  Synthetic
aauagcagugccgacagggugaaggugauuuu

SEQ ID NO: 5530 - RNA, 32 nt, Artificial Sequence
  Synthetic
auagcagugccgacagggugaaggugauuuuc

SEQ ID NO: 5531 - RNA, 32 nt, Artificial Sequence
  Synthetic
uagcagugccgacagggugaaggugauuuucc

SEQ ID NO: 5532 - RNA, 32 nt, Artificial Sequence
  Synthetic
agcagugccgacagggugaaggugauuuucca

SEQ ID NO: 5533 - RNA, 32 nt, Artificial Sequence
  Synthetic
gcagugccgacagggugaaggugauuuuccac

SEQ ID NO: 5534 - RNA, 32 nt, Artificial Sequence
  Synthetic
cagugccgacagggugaaggugauuuuccacc

SEQ ID NO: 5535 - RNA, 32 nt, Artificial Sequence
  Synthetic
agugccgacagggugaaggugauuuuccaccc

SEQ ID NO: 5536 - RNA, 32 nt, Artificial Sequence
  Synthetic
gugccgacagggugaaggugauuuuccacccg

SEQ ID NO: 5537 - RNA, 32 nt, Artificial Sequence
  Synthetic
ugccgacagggugaaggugauuuuccacccgg

SEQ ID NO: 5538 - RNA, 32 nt, Artificial Sequence
  Synthetic
gccgacagggugaaggugauuuuccacccgga

SEQ ID NO: 5539 - RNA, 32 nt, Artificial Sequence
  Synthetic
ccgacagggugaaggugauuuuccacccggag

SEQ ID NO: 5540 - RNA, 32 nt, Artificial Sequence
  Synthetic
cgacagggugaaggugauuuuccacccggagu

SEQ ID NO: 5541 - RNA, 32 nt, Artificial Sequence
  Synthetic
gacagggugaaggugauuuuccacccggaguu

SEQ ID NO: 5542 - RNA, 32 nt, Artificial Sequence
  Synthetic
acagggugaaggugauuuuccacccggaguuc

SEQ ID NO: 5543 - RNA, 32 nt, Artificial Sequence
  Synthetic
cagggugaaggugauuuuccacccggaguucc

SEQ ID NO: 5544 - RNA, 32 nt, Artificial Sequence
  Synthetic
agggugaaggugauuuuccacccggaguuccu

SEQ ID NO: 5545 - RNA, 32 nt, Artificial Sequence
  Synthetic
gggugaaggugauuuuccacccggaguuccuc

SEQ ID NO: 5546 - RNA, 32 nt, Artificial Sequence
  Synthetic
ggugaaggugauuuuccacccggaguuccucu

SEQ ID NO: 5547 - RNA, 32 nt, Artificial Sequence
  Synthetic
gugaaggugauuuuccacccggaguuccucuc

SEQ ID NO: 5548 - RNA, 32 nt, Artificial Sequence
  Synthetic
ugaaggugauuuuccacccggaguuccucucc

SEQ ID NO: 5549 - RNA, 32 nt, Artificial Sequence
  Synthetic
gaaggugauuuuccacccggaguuccucuccu

SEQ ID NO: 5550 - RNA, 32 nt, Artificial Sequence
  Synthetic
aaggugauuuuccacccggaguuccucuccuc

SEQ ID NO: 5551 - RNA, 32 nt, Artificial Sequence
  Synthetic
aggugauuuuccacccggaguuccucuccucc

SEQ ID NO: 5552 - RNA, 32 nt, Artificial Sequence
  Synthetic
ggugauuuuccacccggaguuccucuccucca

SEQ ID NO: 5553 - RNA, 32 nt, Artificial Sequence
  Synthetic
gugauuuuccacccggaguuccucuccuccac

SEQ ID NO: 5554 - RNA, 32 nt, Artificial Sequence
  Synthetic
ugauuuuccacccggaguuccucuccuccaca

SEQ ID NO: 5555 - RNA, 32 nt, Artificial Sequence
  Synthetic
gauuuuccacccggaguuccucuccuccacaa

SEQ ID NO: 5556 - RNA, 32 nt, Artificial Sequence
  Synthetic
auuuuccacccggaguuccucuccuccacaag

SEQ ID NO: 5557 - RNA, 32 nt, Artificial Sequence
  Synthetic
uuuuccacccggaguuccucuccuccacaagc

SEQ ID NO: 5558 - RNA, 32 nt, Artificial Sequence
  Synthetic
uuuccacccggaguuccucuccuccacaagcc

SEQ ID NO: 5559 - RNA, 32 nt, Artificial Sequence
  Synthetic
uuccacccggaguuccucuccuccacaagccc

SEQ ID NO: 5560 - RNA, 32 nt, Artificial Sequence
  Synthetic
uccacccggaguuccucuccuccacaagcccc

SEQ ID NO: 5561 - RNA, 32 nt, Artificial Sequence
  Synthetic
ccacccggaguuccucuccuccacaagccccc

SEQ ID NO: 5562 - RNA, 32 nt, Artificial Sequence
  Synthetic
cacccggaguuccucuccuccacaagcccccu

SEQ ID NO: 5563 - RNA, 32 nt, Artificial Sequence
  Synthetic
acccggaguuccucuccuccacaagcccccug

SEQ ID NO: 5564 - RNA, 32 nt, Artificial Sequence
  Synthetic
cccggaguuccucuccuccacaagcccccugc

SEQ ID NO: 5565 - RNA, 32 nt, Artificial Sequence
  Synthetic
ccggaguuccucuccuccacaagcccccugcu

SEQ ID NO: 5566 - RNA, 32 nt, Artificial Sequence
  Synthetic
cggaguuccucuccuccacaagcccccugcuc

SEQ ID NO: 5567 - RNA, 32 nt, Artificial Sequence
  Synthetic
ggaguuccucuccuccacaagcccccugcucc

SEQ ID NO: 5568 - RNA, 32 nt, Artificial Sequence
  Synthetic
gaguuccucuccuccacaagcccccugcuccc

SEQ ID NO: 5569 - RNA, 32 nt, Artificial Sequence
  Synthetic
aguuccucuccuccacaagcccccugcucccu

SEQ ID NO: 5570 - RNA, 32 nt, Artificial Sequence
  Synthetic
guuccucuccuccacaagcccccugcucccug

SEQ ID NO: 5571 - RNA, 32 nt, Artificial Sequence
  Synthetic
uuccucuccuccacaagcccccugcucccugu

SEQ ID NO: 5572 - RNA, 32 nt, Artificial Sequence
  Synthetic
uccucuccuccacaagcccccugcucccugug

SEQ ID NO: 5573 - RNA, 32 nt, Artificial Sequence
  Synthetic
ccucuccuccacaagcccccugcucccugugg

SEQ ID NO: 5574 - RNA, 32 nt, Artificial Sequence
  Synthetic
cucuccuccacaagcccccugcucccugugga

SEQ ID NO: 5575 - RNA, 32 nt, Artificial Sequence
  Synthetic
ucuccuccacaagcccccugcucccuguggac

SEQ ID NO: 5576 - RNA, 32 nt, Artificial Sequence
  Synthetic
cuccuccacaagcccccugcucccuguggacu

SEQ ID NO: 5577 - RNA, 32 nt, Artificial Sequence
  Synthetic
uccuccacaagcccccugcucccuguggacua

SEQ ID NO: 5578 - RNA, 32 nt, Artificial Sequence
  Synthetic
ccuccacaagcccccugcucccuguggacuau

SEQ ID NO: 5579 - RNA, 32 nt, Artificial Sequence
  Synthetic
cuccacaagcccccugcucccuguggacuaug

SEQ ID NO: 5580 - RNA, 32 nt, Artificial Sequence
  Synthetic
uccacaagcccccugcucccuguggacuauga

SEQ ID NO: 5581 - RNA, 32 nt, Artificial Sequence
  Synthetic
ccacaagcccccugcucccuguggacuaugag

SEQ ID NO: 5582 - RNA, 32 nt, Artificial Sequence
  Synthetic
cacaagcccccugcucccuguggacuaugagg

SEQ ID NO: 5583 - RNA, 32 nt, Artificial Sequence
  Synthetic
acaagcccccugcucccuguggacuaugagga

SEQ ID NO: 5584 - RNA, 32 nt, Artificial Sequence
  Synthetic
caagcccccugcucccuguggacuaugaggag

SEQ ID NO: 5585 - RNA, 32 nt, Artificial Sequence
  Synthetic
aagcccccugcucccuguggacuaugaggagu

SEQ ID NO: 5586 - RNA, 32 nt, Artificial Sequence
  Synthetic
agcccccugcucccuguggacuaugaggaguu

SEQ ID NO: 5587 - RNA, 32 nt, Artificial Sequence
  Synthetic
gcccccugcucccuguggacuaugaggaguuu

SEQ ID NO: 5588 - RNA, 32 nt, Artificial Sequence
  Synthetic
cccccugcucccuguggacuaugaggaguuug

SEQ ID NO: 5589 - RNA, 32 nt, Artificial Sequence
  Synthetic
ccccugcucccuguggacuaugaggaguuugu

SEQ ID NO: 5590 - RNA, 32 nt, Artificial Sequence
  Synthetic
cccugcucccuguggacuaugaggaguuuguc

SEQ ID NO: 5591 - RNA, 32 nt, Artificial Sequence
  Synthetic
ccugcucccuguggacuaugaggaguuugucc

SEQ ID NO: 5592 - RNA, 32 nt, Artificial Sequence
  Synthetic
cugcucccuguggacuaugaggaguuuguccg

SEQ ID NO: 5593 - RNA, 32 nt, Artificial Sequence
  Synthetic
ugcucccuguggacuaugaggaguuuguccgu

SEQ ID NO: 5594 - RNA, 32 nt, Artificial Sequence
  Synthetic
gcucccuguggacuaugaggaguuuguccgug

SEQ ID NO: 5595 - RNA, 32 nt, Artificial Sequence
  Synthetic
cucccuguggacuaugaggaguuuguccgugg

SEQ ID NO: 5596 - RNA, 32 nt, Artificial Sequence
  Synthetic
ucccuguggacuaugaggaguuuguccguggc

SEQ ID NO: 5597 - RNA, 32 nt, Artificial Sequence
  Synthetic
cccuguggacuaugaggaguuuguccguggcu

SEQ ID NO: 5598 - RNA, 32 nt, Artificial Sequence
  Synthetic
ccuguggacuaugaggaguuuguccguggcug

SEQ ID NO: 5599 - RNA, 32 nt, Artificial Sequence
  Synthetic
cuguggacuaugaggaguuuguccguggcugu

SEQ ID NO: 5600 - RNA, 32 nt, Artificial Sequence
  Synthetic
uguggacuaugaggaguuuguccguggcuguc

SEQ ID NO: 5601 - RNA, 32 nt, Artificial Sequence
  Synthetic
guggacuaugaggaguuuguccguggcuguca

SEQ ID NO: 5602 - RNA, 32 nt, Artificial Sequence
  Synthetic
uggacuaugaggaguuuguccguggcugucac

SEQ ID NO: 5603 - RNA, 32 nt, Artificial Sequence
  Synthetic
ggacuaugaggaguuuguccguggcugucacc

SEQ ID NO: 5604 - RNA, 32 nt, Artificial Sequence
  Synthetic
gacuaugaggaguuuguccguggcugucaccu

SEQ ID NO: 5605 - RNA, 32 nt, Artificial Sequence
  Synthetic
acuaugaggaguuuguccguggcugucaccuu

SEQ ID NO: 5606 - RNA, 32 nt, Artificial Sequence
  Synthetic
cuaugaggaguuuguccguggcugucaccuug

SEQ ID NO: 5607 - RNA, 32 nt, Artificial Sequence
  Synthetic
uaugaggaguuuguccguggcugucaccuugg

SEQ ID NO: 5608 - RNA, 32 nt, Artificial Sequence
  Synthetic
augaggaguuuguccguggcugucaccuugga

SEQ ID NO: 5609 - RNA, 32 nt, Artificial Sequence
  Synthetic
ugaggaguuuguccguggcugucaccuuggag

SEQ ID NO: 5610 - RNA, 32 nt, Artificial Sequence
  Synthetic
gaggaguuuguccguggcugucaccuuggagu

SEQ ID NO: 5611 - RNA, 32 nt, Artificial Sequence
  Synthetic
aggaguuuguccguggcugucaccuuggaguc

SEQ ID NO: 5612 - RNA, 32 nt, Artificial Sequence
  Synthetic
ggaguuuguccguggcugucaccuuggagucu

SEQ ID NO: 5613 - RNA, 32 nt, Artificial Sequence
  Synthetic
gaguuuguccguggcugucaccuuggagucuu

SEQ ID NO: 5614 - RNA, 32 nt, Artificial Sequence
  Synthetic
aguuuguccguggcugucaccuuggagucuuc

SEQ ID NO: 5615 - RNA, 32 nt, Artificial Sequence
  Synthetic
guuuguccguggcugucaccuuggagucuucc

SEQ ID NO: 5616 - RNA, 32 nt, Artificial Sequence
  Synthetic
uuuguccguggcugucaccuuggagucuuccc

SEQ ID NO: 5617 - RNA, 32 nt, Artificial Sequence
  Synthetic
uuguccguggcugucaccuuggagucuucccc

SEQ ID NO: 5618 - RNA, 32 nt, Artificial Sequence
  Synthetic
uguccguggcugucaccuuggagucuuccccu

SEQ ID NO: 5619 - RNA, 32 nt, Artificial Sequence
  Synthetic
guccguggcugucaccuuggagucuuccccuc

SEQ ID NO: 5620 - RNA, 32 nt, Artificial Sequence
  Synthetic
uccguggcugucaccuuggagucuuccccucc

SEQ ID NO: 5621 - RNA, 32 nt, Artificial Sequence
  Synthetic
ccguggcugucaccuuggagucuuccccuccu

SEQ ID NO: 5622 - RNA, 32 nt, Artificial Sequence
  Synthetic
cguggcugucaccuuggagucuuccccuccua

SEQ ID NO: 5623 - RNA, 32 nt, Artificial Sequence
  Synthetic
guggcugucaccuuggagucuuccccuccuac

SEQ ID NO: 5624 - RNA, 32 nt, Artificial Sequence
  Synthetic
uggcugucaccuuggagucuuccccuccuacu

SEQ ID NO: 5625 - RNA, 32 nt, Artificial Sequence
  Synthetic
ggcugucaccuuggagucuuccccuccuacua

SEQ ID NO: 5626 - RNA, 32 nt, Artificial Sequence
  Synthetic
gcugucaccuuggagucuuccccuccuacuau

SEQ ID NO: 5627 - RNA, 32 nt, Artificial Sequence
  Synthetic
cugucaccuuggagucuuccccuccuacuaug

SEQ ID NO: 5628 - RNA, 32 nt, Artificial Sequence
  Synthetic
ugucaccuuggagucuuccccuccuacuauga

SEQ ID NO: 5629 - RNA, 32 nt, Artificial Sequence
  Synthetic
gucaccuuggagucuuccccuccuacuaugag

SEQ ID NO: 5630 - RNA, 32 nt, Artificial Sequence
  Synthetic
ucaccuuggagucuuccccuccuacuaugagc

SEQ ID NO: 5631 - RNA, 32 nt, Artificial Sequence
  Synthetic
caccuuggagucuuccccuccuacuaugagcc

SEQ ID NO: 5632 - RNA, 32 nt, Artificial Sequence
  Synthetic
accuuggagucuuccccuccuacuaugagccu

SEQ ID NO: 5633 - RNA, 32 nt, Artificial Sequence
  Synthetic
ccuuggagucuuccccuccuacuaugagccuu

SEQ ID NO: 5634 - RNA, 32 nt, Artificial Sequence
  Synthetic
cuuggagucuuccccuccuacuaugagccuug

SEQ ID NO: 5635 - RNA, 32 nt, Artificial Sequence
  Synthetic
uuggagucuuccccuccuacuaugagccuugg

SEQ ID NO: 5636 - RNA, 32 nt, Artificial Sequence
  Synthetic
uggagucuuccccuccuacuaugagccuuggg

SEQ ID NO: 5637 - RNA, 32 nt, Artificial Sequence
  Synthetic
ggagucuuccccuccuacuaugagccuugggg

SEQ ID NO: 5638 - RNA, 32 nt, Artificial Sequence
  Synthetic
gagucuuccccuccuacuaugagccuuggggc

SEQ ID NO: 5639 - RNA, 32 nt, Artificial Sequence
  Synthetic
agucuuccccuccuacuaugagccuuggggcu

SEQ ID NO: 5640 - RNA, 32 nt, Artificial Sequence
  Synthetic
gucuuccccuccuacuaugagccuuggggcua

SEQ ID NO: 5641 - RNA, 32 nt, Artificial Sequence
  Synthetic
ucuuccccuccuacuaugagccuuggggcuac

SEQ ID NO: 5642 - RNA, 32 nt, Artificial Sequence
  Synthetic
cuuccccuccuacuaugagccuuggggcuaca

SEQ ID NO: 5643 - RNA, 32 nt, Artificial Sequence
  Synthetic
uuccccuccuacuaugagccuuggggcuacac

SEQ ID NO: 5644 - RNA, 32 nt, Artificial Sequence
  Synthetic
uccccuccuacuaugagccuuggggcuacaca

SEQ ID NO: 5645 - RNA, 32 nt, Artificial Sequence
  Synthetic
ccccuccuacuaugagccuuggggcuacacac

SEQ ID NO: 5646 - RNA, 32 nt, Artificial Sequence
  Synthetic
cccuccuacuaugagccuuggggcuacacacc

SEQ ID NO: 5647 - RNA, 32 nt, Artificial Sequence
  Synthetic
ccuccuacuaugagccuuggggcuacacaccg

SEQ ID NO: 5648 - RNA, 32 nt, Artificial Sequence
  Synthetic
cuccuacuaugagccuuggggcuacacaccgg

SEQ ID NO: 5649 - RNA, 32 nt, Artificial Sequence
  Synthetic
uccuacuaugagccuuggggcuacacaccggc

SEQ ID NO: 5650 - RNA, 32 nt, Artificial Sequence
  Synthetic
ccuacuaugagccuuggggcuacacaccggcu

SEQ ID NO: 5651 - RNA, 32 nt, Artificial Sequence
  Synthetic
cuacuaugagccuuggggcuacacaccggcug

SEQ ID NO: 5652 - RNA, 32 nt, Artificial Sequence
  Synthetic
uacuaugagccuuggggcuacacaccggcuga

SEQ ID NO: 5653 - RNA, 32 nt, Artificial Sequence
  Synthetic
acuaugagccuuggggcuacacaccggcugag

SEQ ID NO: 5654 - RNA, 32 nt, Artificial Sequence
  Synthetic
cuaugagccuuggggcuacacaccggcugagu

SEQ ID NO: 5655 - RNA, 32 nt, Artificial Sequence
  Synthetic
uaugagccuuggggcuacacaccggcugagug

SEQ ID NO: 5656 - RNA, 32 nt, Artificial Sequence
  Synthetic
augagccuuggggcuacacaccggcugagugc

SEQ ID NO: 5657 - RNA, 32 nt, Artificial Sequence
  Synthetic
ugagccuuggggcuacacaccggcugagugca

SEQ ID NO: 5658 - RNA, 32 nt, Artificial Sequence
  Synthetic
gagccuuggggcuacacaccggcugagugcac

SEQ ID NO: 5659 - RNA, 32 nt, Artificial Sequence
  Synthetic
agccuuggggcuacacaccggcugagugcacg

SEQ ID NO: 5660 - RNA, 32 nt, Artificial Sequence
  Synthetic
gccuuggggcuacacaccggcugagugcacgg

SEQ ID NO: 5661 - RNA, 32 nt, Artificial Sequence
  Synthetic
ccuuggggcuacacaccggcugagugcacggu

SEQ ID NO: 5662 - RNA, 32 nt, Artificial Sequence
  Synthetic
cuuggggcuacacaccggcugagugcacgguu

SEQ ID NO: 5663 - RNA, 32 nt, Artificial Sequence
  Synthetic
uuggggcuacacaccggcugagugcacgguua

SEQ ID NO: 5664 - RNA, 32 nt, Artificial Sequence
  Synthetic
uggggcuacacaccggcugagugcacgguuau

SEQ ID NO: 5665 - RNA, 32 nt, Artificial Sequence
  Synthetic
ggggcuacacaccggcugagugcacgguuaug

SEQ ID NO: 5666 - RNA, 32 nt, Artificial Sequence
  Synthetic
gggcuacacaccggcugagugcacgguuaugg

SEQ ID NO: 5667 - RNA, 32 nt, Artificial Sequence
  Synthetic
ggcuacacaccggcugagugcacgguuauggg

SEQ ID NO: 5668 - RNA, 32 nt, Artificial Sequence
  Synthetic
gcuacacaccggcugagugcacgguuauggga

SEQ ID NO: 5669 - RNA, 32 nt, Artificial Sequence
  Synthetic
cuacacaccggcugagugcacgguuaugggaa

SEQ ID NO: 5670 - RNA, 32 nt, Artificial Sequence
  Synthetic
uacacaccggcugagugcacgguuaugggaau

SEQ ID NO: 5671 - RNA, 32 nt, Artificial Sequence
  Synthetic
acacaccggcugagugcacgguuaugggaauc

SEQ ID NO: 5672 - RNA, 32 nt, Artificial Sequence
  Synthetic
cacaccggcugagugcacgguuaugggaaucc

SEQ ID NO: 5673 - RNA, 32 nt, Artificial Sequence
  Synthetic
acaccggcugagugcacgguuaugggaauccc

SEQ ID NO: 5674 - RNA, 32 nt, Artificial Sequence
  Synthetic
caccggcugagugcacgguuaugggaaucccc

SEQ ID NO: 5675 - RNA, 32 nt, Artificial Sequence
  Synthetic
accggcugagugcacgguuaugggaaucccca

SEQ ID NO: 5676 - RNA, 32 nt, Artificial Sequence
  Synthetic
ccggcugagugcacgguuaugggaauccccag

SEQ ID NO: 5677 - RNA, 32 nt, Artificial Sequence
  Synthetic
cggcugagugcacgguuaugggaauccccagu

SEQ ID NO: 5678 - RNA, 32 nt, Artificial Sequence
  Synthetic
ggcugagugcacgguuaugggaauccccagua

SEQ ID NO: 5679 - RNA, 32 nt, Artificial Sequence
  Synthetic
gcugagugcacgguuaugggaauccccaguau

SEQ ID NO: 5680 - RNA, 32 nt, Artificial Sequence
  Synthetic
cugagugcacgguuaugggaauccccaguauc

SEQ ID NO: 5681 - RNA, 32 nt, Artificial Sequence
  Synthetic
ugagugcacgguuaugggaauccccaguaucu

SEQ ID NO: 5682 - RNA, 32 nt, Artificial Sequence
  Synthetic
gagugcacgguuaugggaauccccaguaucuc

SEQ ID NO: 5683 - RNA, 32 nt, Artificial Sequence
  Synthetic
agugcacgguuaugggaauccccaguaucucc

SEQ ID NO: 5684 - RNA, 32 nt, Artificial Sequence
  Synthetic
gugcacgguuaugggaauccccaguaucucca

SEQ ID NO: 5685 - RNA, 32 nt, Artificial Sequence
  Synthetic
ugcacgguuaugggaauccccaguaucuccac

SEQ ID NO: 5686 - RNA, 32 nt, Artificial Sequence
  Synthetic
gcacgguuaugggaauccccaguaucuccacc

SEQ ID NO: 5687 - RNA, 32 nt, Artificial Sequence
  Synthetic
cacgguuaugggaauccccaguaucuccacca

SEQ ID NO: 5688 - RNA, 32 nt, Artificial Sequence
  Synthetic
acgguuaugggaauccccaguaucuccaccaa

SEQ ID NO: 5689 - RNA, 32 nt, Artificial Sequence
  Synthetic
cgguuaugggaauccccaguaucuccaccaau

SEQ ID NO: 5690 - RNA, 32 nt, Artificial Sequence
  Synthetic
gguuaugggaauccccaguaucuccaccaauc

SEQ ID NO: 5691 - RNA, 32 nt, Artificial Sequence
  Synthetic
guuaugggaauccccaguaucuccaccaaucu

SEQ ID NO: 5692 - RNA, 32 nt, Artificial Sequence
  Synthetic
uuaugggaauccccaguaucuccaccaaucuc

SEQ ID NO: 5693 - RNA, 32 nt, Artificial Sequence
  Synthetic
uaugggaauccccaguaucuccaccaaucucu

SEQ ID NO: 5694 - RNA, 32 nt, Artificial Sequence
  Synthetic
augggaauccccaguaucuccaccaaucucuc

SEQ ID NO: 5695 - RNA, 32 nt, Artificial Sequence
  Synthetic
ugggaauccccaguaucuccaccaaucucucc

SEQ ID NO: 5696 - RNA, 32 nt, Artificial Sequence
  Synthetic
gggaauccccaguaucuccaccaaucucuccg

SEQ ID NO: 5697 - RNA, 32 nt, Artificial Sequence
  Synthetic
ggaauccccaguaucuccaccaaucucuccgg

SEQ ID NO: 5698 - RNA, 32 nt, Artificial Sequence
  Synthetic
gaauccccaguaucuccaccaaucucuccggc

SEQ ID NO: 5699 - RNA, 32 nt, Artificial Sequence
  Synthetic
aauccccaguaucuccaccaaucucuccggcu

SEQ ID NO: 5700 - RNA, 32 nt, Artificial Sequence
  Synthetic
auccccaguaucuccaccaaucucuccggcuu

SEQ ID NO: 5701 - RNA, 32 nt, Artificial Sequence
  Synthetic
uccccaguaucuccaccaaucucuccggcuuc

SEQ ID NO: 5702 - RNA, 32 nt, Artificial Sequence
  Synthetic
ccccaguaucuccaccaaucucuccggcuucg

SEQ ID NO: 5703 - RNA, 32 nt, Artificial Sequence
  Synthetic
cccaguaucuccaccaaucucuccggcuucgg

SEQ ID NO: 5704 - RNA, 32 nt, Artificial Sequence
  Synthetic
ccaguaucuccaccaaucucuccggcuucggc

SEQ ID NO: 5705 - RNA, 32 nt, Artificial Sequence
  Synthetic
caguaucuccaccaaucucuccggcuucggcu

SEQ ID NO: 5706 - RNA, 32 nt, Artificial Sequence
  Synthetic
aguaucuccaccaaucucuccggcuucggcug

SEQ ID NO: 5707 - RNA, 32 nt, Artificial Sequence
  Synthetic
guaucuccaccaaucucuccggcuucggcugc

SEQ ID NO: 5708 - RNA, 32 nt, Artificial Sequence
  Synthetic
uaucuccaccaaucucuccggcuucggcugcu

SEQ ID NO: 5709 - RNA, 32 nt, Artificial Sequence
  Synthetic
aucuccaccaaucucuccggcuucggcugcuu

SEQ ID NO: 5710 - RNA, 32 nt, Artificial Sequence
  Synthetic
ucuccaccaaucucuccggcuucggcugcuuc

SEQ ID NO: 5711 - RNA, 32 nt, Artificial Sequence
  Synthetic
cuccaccaaucucuccggcuucggcugcuuca

SEQ ID NO: 5712 - RNA, 32 nt, Artificial Sequence
  Synthetic
uccaccaaucucuccggcuucggcugcuucau

SEQ ID NO: 5713 - RNA, 32 nt, Artificial Sequence
  Synthetic
ccaccaaucucuccggcuucggcugcuucaug

SEQ ID NO: 5714 - RNA, 32 nt, Artificial Sequence
  Synthetic
caccaaucucuccggcuucggcugcuucaugg

SEQ ID NO: 5715 - RNA, 32 nt, Artificial Sequence
  Synthetic
accaaucucuccggcuucggcugcuucaugga

SEQ ID NO: 5716 - RNA, 32 nt, Artificial Sequence
  Synthetic
ccaaucucuccggcuucggcugcuucauggag

SEQ ID NO: 5717 - RNA, 32 nt, Artificial Sequence
  Synthetic
caaucucuccggcuucggcugcuucauggagg

SEQ ID NO: 5718 - RNA, 32 nt, Artificial Sequence
  Synthetic
aaucucuccggcuucggcugcuucauggagga

SEQ ID NO: 5719 - RNA, 32 nt, Artificial Sequence
  Synthetic
aucucuccggcuucggcugcuucauggaggaa

SEQ ID NO: 5720 - RNA, 32 nt, Artificial Sequence
  Synthetic
ucucuccggcuucggcugcuucauggaggaac

SEQ ID NO: 5721 - RNA, 32 nt, Artificial Sequence
  Synthetic
cucuccggcuucggcugcuucauggaggaaca

SEQ ID NO: 5722 - RNA, 32 nt, Artificial Sequence
  Synthetic
ucuccggcuucggcugcuucauggaggaacac

SEQ ID NO: 5723 - RNA, 32 nt, Artificial Sequence
  Synthetic
cuccggcuucggcugcuucauggaggaacaca

SEQ ID NO: 5724 - RNA, 32 nt, Artificial Sequence
  Synthetic
uccggcuucggcugcuucauggaggaacacau

SEQ ID NO: 5725 - RNA, 32 nt, Artificial Sequence
  Synthetic
ccggcuucggcugcuucauggaggaacacauc

SEQ ID NO: 5726 - RNA, 32 nt, Artificial Sequence
  Synthetic
cggcuucggcugcuucauggaggaacacaucg

SEQ ID NO: 5727 - RNA, 32 nt, Artificial Sequence
  Synthetic
ggcuucggcugcuucauggaggaacacaucgc

SEQ ID NO: 5728 - RNA, 32 nt, Artificial Sequence
  Synthetic
gcuucggcugcuucauggaggaacacaucgca

SEQ ID NO: 5729 - RNA, 32 nt, Artificial Sequence
  Synthetic
cuucggcugcuucauggaggaacacaucgcag

SEQ ID NO: 5730 - RNA, 32 nt, Artificial Sequence
  Synthetic
uucggcugcuucauggaggaacacaucgcaga

SEQ ID NO: 5731 - RNA, 32 nt, Artificial Sequence
  Synthetic
ucggcugcuucauggaggaacacaucgcagac

SEQ ID NO: 5732 - RNA, 32 nt, Artificial Sequence
  Synthetic
cggcugcuucauggaggaacacaucgcagacc

SEQ ID NO: 5733 - RNA, 32 nt, Artificial Sequence
  Synthetic
ggcugcuucauggaggaacacaucgcagaccc

SEQ ID NO: 5734 - RNA, 32 nt, Artificial Sequence
  Synthetic
gcugcuucauggaggaacacaucgcagacccc

SEQ ID NO: 5735 - RNA, 32 nt, Artificial Sequence
  Synthetic
cugcuucauggaggaacacaucgcagaccccu

SEQ ID NO: 5736 - RNA, 32 nt, Artificial Sequence
  Synthetic
ugcuucauggaggaacacaucgcagaccccuc

SEQ ID NO: 5737 - RNA, 32 nt, Artificial Sequence
  Synthetic
gcuucauggaggaacacaucgcagaccccuca

SEQ ID NO: 5738 - RNA, 32 nt, Artificial Sequence
  Synthetic
cuucauggaggaacacaucgcagaccccucag

SEQ ID NO: 5739 - RNA, 32 nt, Artificial Sequence
  Synthetic
uucauggaggaacacaucgcagaccccucagc

SEQ ID NO: 5740 - RNA, 32 nt, Artificial Sequence
  Synthetic
ucauggaggaacacaucgcagaccccucagcu

SEQ ID NO: 5741 - RNA, 32 nt, Artificial Sequence
  Synthetic
cauggaggaacacaucgcagaccccucagcuu

SEQ ID NO: 5742 - RNA, 32 nt, Artificial Sequence
  Synthetic
auggaggaacacaucgcagaccccucagcuua

SEQ ID NO: 5743 - RNA, 32 nt, Artificial Sequence
  Synthetic
uggaggaacacaucgcagaccccucagcuuac

SEQ ID NO: 5744 - RNA, 32 nt, Artificial Sequence
  Synthetic
ggaggaacacaucgcagaccccucagcuuacg

SEQ ID NO: 5745 - RNA, 32 nt, Artificial Sequence
  Synthetic
gaggaacacaucgcagaccccucagcuuacgg

SEQ ID NO: 5746 - RNA, 32 nt, Artificial Sequence
  Synthetic
aggaacacaucgcagaccccucagcuuacggu

SEQ ID NO: 5747 - RNA, 32 nt, Artificial Sequence
  Synthetic
ggaacacaucgcagaccccucagcuuacggua

SEQ ID NO: 5748 - RNA, 32 nt, Artificial Sequence
  Synthetic
gaacacaucgcagaccccucagcuuacgguau

SEQ ID NO: 5749 - RNA, 32 nt, Artificial Sequence
  Synthetic
aacacaucgcagaccccucagcuuacgguauc

SEQ ID NO: 5750 - RNA, 32 nt, Artificial Sequence
  Synthetic
acacaucgcagaccccucagcuuacgguaucu

SEQ ID NO: 5751 - RNA, 32 nt, Artificial Sequence
  Synthetic
cacaucgcagaccccucagcuuacgguaucua

SEQ ID NO: 5752 - RNA, 32 nt, Artificial Sequence
  Synthetic
acaucgcagaccccucagcuuacgguaucuac

SEQ ID NO: 5753 - RNA, 32 nt, Artificial Sequence
  Synthetic
caucgcagaccccucagcuuacgguaucuaca

SEQ ID NO: 5754 - RNA, 32 nt, Artificial Sequence
  Synthetic
aucgcagaccccucagcuuacgguaucuacau

SEQ ID NO: 5755 - RNA, 32 nt, Artificial Sequence
  Synthetic
ucgcagaccccucagcuuacgguaucuacauu

SEQ ID NO: 5756 - RNA, 32 nt, Artificial Sequence
  Synthetic
cgcagaccccucagcuuacgguaucuacauuc

SEQ ID NO: 5757 - RNA, 32 nt, Artificial Sequence
  Synthetic
gcagaccccucagcuuacgguaucuacauucu

SEQ ID NO: 5758 - RNA, 32 nt, Artificial Sequence
  Synthetic
cagaccccucagcuuacgguaucuacauucuu

SEQ ID NO: 5759 - RNA, 32 nt, Artificial Sequence
  Synthetic
agaccccucagcuuacgguaucuacauucuug

SEQ ID NO: 5760 - RNA, 32 nt, Artificial Sequence
  Synthetic
gaccccucagcuuacgguaucuacauucuuga

SEQ ID NO: 5761 - RNA, 32 nt, Artificial Sequence
  Synthetic
accccucagcuuacgguaucuacauucuugac

SEQ ID NO: 5762 - RNA, 32 nt, Artificial Sequence
  Synthetic
ccccucagcuuacgguaucuacauucuugacc

SEQ ID NO: 5763 - RNA, 32 nt, Artificial Sequence
  Synthetic
cccucagcuuacgguaucuacauucuugaccg

SEQ ID NO: 5764 - RNA, 32 nt, Artificial Sequence
  Synthetic
ccucagcuuacgguaucuacauucuugaccgg

SEQ ID NO: 5765 - RNA, 32 nt, Artificial Sequence
  Synthetic
cucagcuuacgguaucuacauucuugaccggc

SEQ ID NO: 5766 - RNA, 32 nt, Artificial Sequence
  Synthetic
ucagcuuacgguaucuacauucuugaccggcg

SEQ ID NO: 5767 - RNA, 32 nt, Artificial Sequence
  Synthetic
cagcuuacgguaucuacauucuugaccggcgg

SEQ ID NO: 5768 - RNA, 32 nt, Artificial Sequence
  Synthetic
agcuuacgguaucuacauucuugaccggcggu

SEQ ID NO: 5769 - RNA, 32 nt, Artificial Sequence
  Synthetic
gcuuacgguaucuacauucuugaccggcgguu

SEQ ID NO: 5770 - RNA, 32 nt, Artificial Sequence
  Synthetic
cuuacgguaucuacauucuugaccggcgguuc

SEQ ID NO: 5771 - RNA, 32 nt, Artificial Sequence
  Synthetic
uuacgguaucuacauucuugaccggcgguucc

SEQ ID NO: 5772 - RNA, 32 nt, Artificial Sequence
  Synthetic
uacgguaucuacauucuugaccggcgguuccg

SEQ ID NO: 5773 - RNA, 32 nt, Artificial Sequence
  Synthetic
acgguaucuacauucuugaccggcgguuccgc

SEQ ID NO: 5774 - RNA, 32 nt, Artificial Sequence
  Synthetic
cgguaucuacauucuugaccggcgguuccgca

SEQ ID NO: 5775 - RNA, 32 nt, Artificial Sequence
  Synthetic
gguaucuacauucuugaccggcgguuccgcag

SEQ ID NO: 5776 - RNA, 32 nt, Artificial Sequence
  Synthetic
guaucuacauucuugaccggcgguuccgcagc

SEQ ID NO: 5777 - RNA, 32 nt, Artificial Sequence
  Synthetic
uaucuacauucuugaccggcgguuccgcagcc

SEQ ID NO: 5778 - RNA, 32 nt, Artificial Sequence
  Synthetic
aucuacauucuugaccggcgguuccgcagccu

SEQ ID NO: 5779 - RNA, 32 nt, Artificial Sequence
  Synthetic
ucuacauucuugaccggcgguuccgcagccug

SEQ ID NO: 5780 - RNA, 32 nt, Artificial Sequence
  Synthetic
cuacauucuugaccggcgguuccgcagccugg

SEQ ID NO: 5781 - RNA, 32 nt, Artificial Sequence
  Synthetic
uacauucuugaccggcgguuccgcagccugga

SEQ ID NO: 5782 - RNA, 32 nt, Artificial Sequence
  Synthetic
acauucuugaccggcgguuccgcagccuggau

SEQ ID NO: 5783 - RNA, 32 nt, Artificial Sequence
  Synthetic
cauucuugaccggcgguuccgcagccuggaug

SEQ ID NO: 5784 - RNA, 32 nt, Artificial Sequence
  Synthetic
auucuugaccggcgguuccgcagccuggauga

SEQ ID NO: 5785 - RNA, 32 nt, Artificial Sequence
  Synthetic
uucuugaccggcgguuccgcagccuggaugau

SEQ ID NO: 5786 - RNA, 32 nt, Artificial Sequence
  Synthetic
ucuugaccggcgguuccgcagccuggaugauu

SEQ ID NO: 5787 - RNA, 32 nt, Artificial Sequence
  Synthetic
cuugaccggcgguuccgcagccuggaugauuc

SEQ ID NO: 5788 - RNA, 32 nt, Artificial Sequence
  Synthetic
uugaccggcgguuccgcagccuggaugauucc

SEQ ID NO: 5789 - RNA, 32 nt, Artificial Sequence
  Synthetic
ugaccggcgguuccgcagccuggaugauuccu

SEQ ID NO: 5790 - RNA, 32 nt, Artificial Sequence
  Synthetic
gaccggcgguuccgcagccuggaugauuccug

SEQ ID NO: 5791 - RNA, 32 nt, Artificial Sequence
  Synthetic
accggcgguuccgcagccuggaugauuccugc

SEQ ID NO: 5792 - RNA, 32 nt, Artificial Sequence
  Synthetic
ccggcgguuccgcagccuggaugauuccugcu

SEQ ID NO: 5793 - RNA, 32 nt, Artificial Sequence
  Synthetic
cggcgguuccgcagccuggaugauuccugcuc

SEQ ID NO: 5794 - RNA, 32 nt, Artificial Sequence
  Synthetic
ggcgguuccgcagccuggaugauuccugcucg

SEQ ID NO: 5795 - RNA, 32 nt, Artificial Sequence
  Synthetic
gcgguuccgcagccuggaugauuccugcucgc

SEQ ID NO: 5796 - RNA, 32 nt, Artificial Sequence
  Synthetic
cgguuccgcagccuggaugauuccugcucgca

SEQ ID NO: 5797 - RNA, 32 nt, Artificial Sequence
  Synthetic
gguuccgcagccuggaugauuccugcucgcag

SEQ ID NO: 5798 - RNA, 32 nt, Artificial Sequence
  Synthetic
guuccgcagccuggaugauuccugcucgcagc

SEQ ID NO: 5799 - RNA, 32 nt, Artificial Sequence
  Synthetic
uuccgcagccuggaugauuccugcucgcagcu

SEQ ID NO: 5800 - RNA, 32 nt, Artificial Sequence
  Synthetic
uccgcagccuggaugauuccugcucgcagcuc

SEQ ID NO: 5801 - RNA, 32 nt, Artificial Sequence
  Synthetic
ccgcagccuggaugauuccugcucgcagcuca

SEQ ID NO: 5802 - RNA, 32 nt, Artificial Sequence
  Synthetic
cgcagccuggaugauuccugcucgcagcucac

SEQ ID NO: 5803 - RNA, 32 nt, Artificial Sequence
  Synthetic
gcagccuggaugauuccugcucgcagcucacc

SEQ ID NO: 5804 - RNA, 32 nt, Artificial Sequence
  Synthetic
cagccuggaugauuccugcucgcagcucaccu

SEQ ID NO: 5805 - RNA, 32 nt, Artificial Sequence
  Synthetic
agccuggaugauuccugcucgcagcucaccuc

SEQ ID NO: 5806 - RNA, 32 nt, Artificial Sequence
  Synthetic
gccuggaugauuccugcucgcagcucaccucc

SEQ ID NO: 5807 - RNA, 32 nt, Artificial Sequence
  Synthetic
ccuggaugauuccugcucgcagcucaccuccu

SEQ ID NO: 5808 - RNA, 32 nt, Artificial Sequence
  Synthetic
cuggaugauuccugcucgcagcucaccuccuu

SEQ ID NO: 5809 - RNA, 32 nt, Artificial Sequence
  Synthetic
uggaugauuccugcucgcagcucaccuccuuc

SEQ ID NO: 5810 - RNA, 32 nt, Artificial Sequence
  Synthetic
ggaugauuccugcucgcagcucaccuccuucc

SEQ ID NO: 5811 - RNA, 32 nt, Artificial Sequence
  Synthetic
gaugauuccugcucgcagcucaccuccuuccu

SEQ ID NO: 5812 - RNA, 32 nt, Artificial Sequence
  Synthetic
augauuccugcucgcagcucaccuccuuccuc

SEQ ID NO: 5813 - RNA, 32 nt, Artificial Sequence
  Synthetic
ugauuccugcucgcagcucaccuccuuccucu

SEQ ID NO: 5814 - RNA, 32 nt, Artificial Sequence
  Synthetic
gauuccugcucgcagcucaccuccuuccucua

SEQ ID NO: 5815 - RNA, 32 nt, Artificial Sequence
  Synthetic
auuccugcucgcagcucaccuccuuccucuac

SEQ ID NO: 5816 - RNA, 32 nt, Artificial Sequence
  Synthetic
uuccugcucgcagcucaccuccuuccucuaca

SEQ ID NO: 5817 - RNA, 32 nt, Artificial Sequence
  Synthetic
uccugcucgcagcucaccuccuuccucuacag

SEQ ID NO: 5818 - RNA, 32 nt, Artificial Sequence
  Synthetic
ccugcucgcagcucaccuccuuccucuacagu

SEQ ID NO: 5819 - RNA, 32 nt, Artificial Sequence
  Synthetic
cugcucgcagcucaccuccuuccucuacaguu

SEQ ID NO: 5820 - RNA, 32 nt, Artificial Sequence
  Synthetic
ugcucgcagcucaccuccuuccucuacaguuu

SEQ ID NO: 5821 - RNA, 32 nt, Artificial Sequence
  Synthetic
gcucgcagcucaccuccuuccucuacaguuuc

SEQ ID NO: 5822 - RNA, 32 nt, Artificial Sequence
  Synthetic
cucgcagcucaccuccuuccucuacaguuucu

SEQ ID NO: 5823 - RNA, 32 nt, Artificial Sequence
  Synthetic
ucgcagcucaccuccuuccucuacaguuucug

SEQ ID NO: 5824 - RNA, 32 nt, Artificial Sequence
  Synthetic
cgcagcucaccuccuuccucuacaguuucugu

SEQ ID NO: 5825 - RNA, 32 nt, Artificial Sequence
  Synthetic
gcagcucaccuccuuccucuacaguuucuguc

SEQ ID NO: 5826 - RNA, 32 nt, Artificial Sequence
  Synthetic
cagcucaccuccuuccucuacaguuucuguca

SEQ ID NO: 5827 - RNA, 32 nt, Artificial Sequence
  Synthetic
agcucaccuccuuccucuacaguuucugucag

SEQ ID NO: 5828 - RNA, 32 nt, Artificial Sequence
  Synthetic
gcucaccuccuuccucuacaguuucugucagc

SEQ ID NO: 5829 - RNA, 32 nt, Artificial Sequence
  Synthetic
cucaccuccuuccucuacaguuucugucagca

SEQ ID NO: 5830 - RNA, 32 nt, Artificial Sequence
  Synthetic
ucaccuccuuccucuacaguuucugucagcag

SEQ ID NO: 5831 - RNA, 32 nt, Artificial Sequence
  Synthetic
caccuccuuccucuacaguuucugucagcaga

SEQ ID NO: 5832 - RNA, 32 nt, Artificial Sequence
  Synthetic
accuccuuccucuacaguuucugucagcagag

SEQ ID NO: 5833 - RNA, 32 nt, Artificial Sequence
  Synthetic
ccuccuuccucuacaguuucugucagcagagc

SEQ ID NO: 5834 - RNA, 32 nt, Artificial Sequence
  Synthetic
cuccuuccucuacaguuucugucagcagagcc

SEQ ID NO: 5835 - RNA, 32 nt, Artificial Sequence
  Synthetic
uccuuccucuacaguuucugucagcagagccg

SEQ ID NO: 5836 - RNA, 32 nt, Artificial Sequence
  Synthetic
ccuuccucuacaguuucugucagcagagccgg

SEQ ID NO: 5837 - RNA, 32 nt, Artificial Sequence
  Synthetic
cuuccucuacaguuucugucagcagagccggc

SEQ ID NO: 5838 - RNA, 32 nt, Artificial Sequence
  Synthetic
uuccucuacaguuucugucagcagagccggcg

SEQ ID NO: 5839 - RNA, 32 nt, Artificial Sequence
  Synthetic
uccucuacaguuucugucagcagagccggcgg

SEQ ID NO: 5840 - RNA, 32 nt, Artificial Sequence
  Synthetic
ccucuacaguuucugucagcagagccggcggc

SEQ ID NO: 5841 - RNA, 32 nt, Artificial Sequence
  Synthetic
cucuacaguuucugucagcagagccggcggca

SEQ ID NO: 5842 - RNA, 32 nt, Artificial Sequence
  Synthetic
ucuacaguuucugucagcagagccggcggcag

SEQ ID NO: 5843 - RNA, 32 nt, Artificial Sequence
  Synthetic
cuacaguuucugucagcagagccggcggcagc

SEQ ID NO: 5844 - RNA, 32 nt, Artificial Sequence
  Synthetic
uacaguuucugucagcagagccggcggcagcg

SEQ ID NO: 5845 - RNA, 32 nt, Artificial Sequence
  Synthetic
acaguuucugucagcagagccggcggcagcgu

SEQ ID NO: 5846 - RNA, 32 nt, Artificial Sequence
  Synthetic
caguuucugucagcagagccggcggcagcgua

SEQ ID NO: 5847 - RNA, 32 nt, Artificial Sequence
  Synthetic
aguuucugucagcagagccggcggcagcguau

SEQ ID NO: 5848 - RNA, 32 nt, Artificial Sequence
  Synthetic
guuucugucagcagagccggcggcagcguauc

SEQ ID NO: 5849 - RNA, 32 nt, Artificial Sequence
  Synthetic
uuucugucagcagagccggcggcagcguauca

SEQ ID NO: 5850 - RNA, 32 nt, Artificial Sequence
  Synthetic
uucugucagcagagccggcggcagcguaucau

SEQ ID NO: 5851 - RNA, 32 nt, Artificial Sequence
  Synthetic
ucugucagcagagccggcggcagcguaucauc

SEQ ID NO: 5852 - RNA, 32 nt, Artificial Sequence
  Synthetic
cugucagcagagccggcggcagcguaucaucc

SEQ ID NO: 5853 - RNA, 32 nt, Artificial Sequence
  Synthetic
ugucagcagagccggcggcagcguaucaucca

SEQ ID NO: 5854 - RNA, 32 nt, Artificial Sequence
  Synthetic
gucagcagagccggcggcagcguaucauccag

SEQ ID NO: 5855 - RNA, 32 nt, Artificial Sequence
  Synthetic
ucagcagagccggcggcagcguaucauccagc

SEQ ID NO: 5856 - RNA, 32 nt, Artificial Sequence
  Synthetic
cagcagagccggcggcagcguaucauccagcg

SEQ ID NO: 5857 - RNA, 32 nt, Artificial Sequence
  Synthetic
agcagagccggcggcagcguaucauccagcgg

SEQ ID NO: 5858 - RNA, 32 nt, Artificial Sequence
  Synthetic
gcagagccggcggcagcguaucauccagcgga

SEQ ID NO: 5859 - RNA, 32 nt, Artificial Sequence
  Synthetic
cagagccggcggcagcguaucauccagcggaa

SEQ ID NO: 5860 - RNA, 32 nt, Artificial Sequence
  Synthetic
agagccggcggcagcguaucauccagcggaac

SEQ ID NO: 5861 - RNA, 32 nt, Artificial Sequence
  Synthetic
gagccggcggcagcguaucauccagcggaacc

SEQ ID NO: 5862 - RNA, 32 nt, Artificial Sequence
  Synthetic
agccggcggcagcguaucauccagcggaaccg

SEQ ID NO: 5863 - RNA, 32 nt, Artificial Sequence
  Synthetic
gccggcggcagcguaucauccagcggaaccgc

SEQ ID NO: 5864 - RNA, 32 nt, Artificial Sequence
  Synthetic
ccggcggcagcguaucauccagcggaaccgca

SEQ ID NO: 5865 - RNA, 32 nt, Artificial Sequence
  Synthetic
cggcggcagcguaucauccagcggaaccgcac

SEQ ID NO: 5866 - RNA, 32 nt, Artificial Sequence
  Synthetic
ggcggcagcguaucauccagcggaaccgcacg

SEQ ID NO: 5867 - RNA, 32 nt, Artificial Sequence
  Synthetic
gcggcagcguaucauccagcggaaccgcacgg

SEQ ID NO: 5868 - RNA, 32 nt, Artificial Sequence
  Synthetic
cggcagcguaucauccagcggaaccgcacgga

SEQ ID NO: 5869 - RNA, 32 nt, Artificial Sequence
  Synthetic
ggcagcguaucauccagcggaaccgcacggag

SEQ ID NO: 5870 - RNA, 32 nt, Artificial Sequence
  Synthetic
gcagcguaucauccagcggaaccgcacggagc

SEQ ID NO: 5871 - RNA, 32 nt, Artificial Sequence
  Synthetic
cagcguaucauccagcggaaccgcacggagcg

SEQ ID NO: 5872 - RNA, 32 nt, Artificial Sequence
  Synthetic
agcguaucauccagcggaaccgcacggagcgc

SEQ ID NO: 5873 - RNA, 32 nt, Artificial Sequence
  Synthetic
gcguaucauccagcggaaccgcacggagcgcc

SEQ ID NO: 5874 - RNA, 32 nt, Artificial Sequence
  Synthetic
cguaucauccagcggaaccgcacggagcgccu

SEQ ID NO: 5875 - RNA, 32 nt, Artificial Sequence
  Synthetic
guaucauccagcggaaccgcacggagcgccuc

SEQ ID NO: 5876 - RNA, 32 nt, Artificial Sequence
  Synthetic
uaucauccagcggaaccgcacggagcgccucu

SEQ ID NO: 5877 - RNA, 32 nt, Artificial Sequence
  Synthetic
aucauccagcggaaccgcacggagcgccucuc

SEQ ID NO: 5878 - RNA, 32 nt, Artificial Sequence
  Synthetic
ucauccagcggaaccgcacggagcgccucucc

SEQ ID NO: 5879 - RNA, 32 nt, Artificial Sequence
  Synthetic
cauccagcggaaccgcacggagcgccucuccg

SEQ ID NO: 5880 - RNA, 32 nt, Artificial Sequence
  Synthetic
auccagcggaaccgcacggagcgccucuccga

SEQ ID NO: 5881 - RNA, 32 nt, Artificial Sequence
  Synthetic
uccagcggaaccgcacggagcgccucuccgac

SEQ ID NO: 5882 - RNA, 32 nt, Artificial Sequence
  Synthetic
ccagcggaaccgcacggagcgccucuccgacc

SEQ ID NO: 5883 - RNA, 32 nt, Artificial Sequence
  Synthetic
cagcggaaccgcacggagcgccucuccgaccu

SEQ ID NO: 5884 - RNA, 32 nt, Artificial Sequence
  Synthetic
agcggaaccgcacggagcgccucuccgaccuu

SEQ ID NO: 5885 - RNA, 32 nt, Artificial Sequence
  Synthetic
gcggaaccgcacggagcgccucuccgaccuuc

SEQ ID NO: 5886 - RNA, 32 nt, Artificial Sequence
  Synthetic
cggaaccgcacggagcgccucuccgaccuucu

SEQ ID NO: 5887 - RNA, 32 nt, Artificial Sequence
  Synthetic
ggaaccgcacggagcgccucuccgaccuucug

SEQ ID NO: 5888 - RNA, 32 nt, Artificial Sequence
  Synthetic
gaaccgcacggagcgccucuccgaccuucugg

SEQ ID NO: 5889 - RNA, 32 nt, Artificial Sequence
  Synthetic
aaccgcacggagcgccucuccgaccuucugga

SEQ ID NO: 5890 - RNA, 32 nt, Artificial Sequence
  Synthetic
accgcacggagcgccucuccgaccuucuggac

SEQ ID NO: 5891 - RNA, 32 nt, Artificial Sequence
  Synthetic
ccgcacggagcgccucuccgaccuucuggacu

SEQ ID NO: 5892 - RNA, 32 nt, Artificial Sequence
  Synthetic
cgcacggagcgccucuccgaccuucuggacug

SEQ ID NO: 5893 - RNA, 32 nt, Artificial Sequence
  Synthetic
gcacggagcgccucuccgaccuucuggacugg

SEQ ID NO: 5894 - RNA, 32 nt, Artificial Sequence
  Synthetic
cacggagcgccucuccgaccuucuggacugga

SEQ ID NO: 5895 - RNA, 32 nt, Artificial Sequence
  Synthetic
acggagcgccucuccgaccuucuggacuggaa

SEQ ID NO: 5896 - RNA, 32 nt, Artificial Sequence
  Synthetic
cggagcgccucuccgaccuucuggacuggaaa

SEQ ID NO: 5897 - RNA, 32 nt, Artificial Sequence
  Synthetic
ggagcgccucuccgaccuucuggacuggaaau

SEQ ID NO: 5898 - RNA, 32 nt, Artificial Sequence
  Synthetic
gagcgccucuccgaccuucuggacuggaaaua

SEQ ID NO: 5899 - RNA, 32 nt, Artificial Sequence
  Synthetic
agcgccucuccgaccuucuggacuggaaauac

SEQ ID NO: 5900 - RNA, 32 nt, Artificial Sequence
  Synthetic
gcgccucuccgaccuucuggacuggaaauacc

SEQ ID NO: 5901 - RNA, 32 nt, Artificial Sequence
  Synthetic
cgccucuccgaccuucuggacuggaaauaccu

SEQ ID NO: 5902 - RNA, 32 nt, Artificial Sequence
  Synthetic
gccucuccgaccuucuggacuggaaauaccua

SEQ ID NO: 5903 - RNA, 32 nt, Artificial Sequence
  Synthetic
ccucuccgaccuucuggacuggaaauaccuag

SEQ ID NO: 5904 - RNA, 32 nt, Artificial Sequence
  Synthetic
cucuccgaccuucuggacuggaaauaccuagg

SEQ ID NO: 5905 - RNA, 32 nt, Artificial Sequence
  Synthetic
ucuccgaccuucuggacuggaaauaccuaggc

SEQ ID NO: 5906 - RNA, 32 nt, Artificial Sequence
  Synthetic
cuccgaccuucuggacuggaaauaccuaggcc

SEQ ID NO: 5907 - RNA, 32 nt, Artificial Sequence
  Synthetic
uccgaccuucuggacuggaaauaccuaggccg

SEQ ID NO: 5908 - RNA, 32 nt, Artificial Sequence
  Synthetic
ccgaccuucuggacuggaaauaccuaggccgg

SEQ ID NO: 5909 - RNA, 32 nt, Artificial Sequence
  Synthetic
cgaccuucuggacuggaaauaccuaggccggu

SEQ ID NO: 5910 - RNA, 32 nt, Artificial Sequence
  Synthetic
gaccuucuggacuggaaauaccuaggccggua

SEQ ID NO: 5911 - RNA, 32 nt, Artificial Sequence
  Synthetic
accuucuggacuggaaauaccuaggccgguac

SEQ ID NO: 5912 - RNA, 32 nt, Artificial Sequence
  Synthetic
ccuucuggacuggaaauaccuaggccgguacu

SEQ ID NO: 5913 - RNA, 32 nt, Artificial Sequence
  Synthetic
cuucuggacuggaaauaccuaggccgguacua

SEQ ID NO: 5914 - RNA, 32 nt, Artificial Sequence
  Synthetic
uucuggacuggaaauaccuaggccgguacuau

SEQ ID NO: 5915 - RNA, 32 nt, Artificial Sequence
  Synthetic
ucuggacuggaaauaccuaggccgguacuaua

SEQ ID NO: 5916 - RNA, 32 nt, Artificial Sequence
  Synthetic
cuggacuggaaauaccuaggccgguacuauau

SEQ ID NO: 5917 - RNA, 32 nt, Artificial Sequence
  Synthetic
uggacuggaaauaccuaggccgguacuauaug

SEQ ID NO: 5918 - RNA, 32 nt, Artificial Sequence
  Synthetic
ggacuggaaauaccuaggccgguacuauaugu

SEQ ID NO: 5919 - RNA, 32 nt, Artificial Sequence
  Synthetic
gacuggaaauaccuaggccgguacuauauguc

SEQ ID NO: 5920 - RNA, 32 nt, Artificial Sequence
  Synthetic
acuggaaauaccuaggccgguacuauaugucu

SEQ ID NO: 5921 - RNA, 32 nt, Artificial Sequence
  Synthetic
cuggaaauaccuaggccgguacuauaugucug

SEQ ID NO: 5922 - RNA, 32 nt, Artificial Sequence
  Synthetic
uggaaauaccuaggccgguacuauaugucugc

SEQ ID NO: 5923 - RNA, 32 nt, Artificial Sequence
  Synthetic
ggaaauaccuaggccgguacuauaugucugcg

SEQ ID NO: 5924 - RNA, 32 nt, Artificial Sequence
  Synthetic
gaaauaccuaggccgguacuauaugucugcgc

SEQ ID NO: 5925 - RNA, 32 nt, Artificial Sequence
  Synthetic
aaauaccuaggccgguacuauaugucugcgcg

SEQ ID NO: 5926 - RNA, 32 nt, Artificial Sequence
  Synthetic
aauaccuaggccgguacuauaugucugcgcgc

SEQ ID NO: 5927 - RNA, 32 nt, Artificial Sequence
  Synthetic
auaccuaggccgguacuauaugucugcgcgcc

SEQ ID NO: 5928 - RNA, 32 nt, Artificial Sequence
  Synthetic
uaccuaggccgguacuauaugucugcgcgcca

SEQ ID NO: 5929 - RNA, 32 nt, Artificial Sequence
  Synthetic
accuaggccgguacuauaugucugcgcgccac

SEQ ID NO: 5930 - RNA, 32 nt, Artificial Sequence
  Synthetic
ccuaggccgguacuauaugucugcgcgccaca

SEQ ID NO: 5931 - RNA, 32 nt, Artificial Sequence
  Synthetic
cuaggccgguacuauaugucugcgcgccacau

SEQ ID NO: 5932 - RNA, 32 nt, Artificial Sequence
  Synthetic
uaggccgguacuauaugucugcgcgccacaug

SEQ ID NO: 5933 - RNA, 32 nt, Artificial Sequence
  Synthetic
aggccgguacuauaugucugcgcgccacaugg

SEQ ID NO: 5934 - RNA, 32 nt, Artificial Sequence
  Synthetic
ggccgguacuauaugucugcgcgccacauggc

SEQ ID NO: 5935 - RNA, 32 nt, Artificial Sequence
  Synthetic
gccgguacuauaugucugcgcgccacauggcg

SEQ ID NO: 5936 - RNA, 32 nt, Artificial Sequence
  Synthetic
ccgguacuauaugucugcgcgccacauggcgc

SEQ ID NO: 5937 - RNA, 32 nt, Artificial Sequence
  Synthetic
cgguacuauaugucugcgcgccacauggcgcu

SEQ ID NO: 5938 - RNA, 32 nt, Artificial Sequence
  Synthetic
gguacuauaugucugcgcgccacauggcgcug

SEQ ID NO: 5939 - RNA, 32 nt, Artificial Sequence
  Synthetic
guacuauaugucugcgcgccacauggcgcugu

SEQ ID NO: 5940 - RNA, 32 nt, Artificial Sequence
  Synthetic
uacuauaugucugcgcgccacauggcgcuguc

SEQ ID NO: 5941 - RNA, 32 nt, Artificial Sequence
  Synthetic
acuauaugucugcgcgccacauggcgcugucc

SEQ ID NO: 5942 - RNA, 32 nt, Artificial Sequence
  Synthetic
cuauaugucugcgcgccacauggcgcugucca

SEQ ID NO: 5943 - RNA, 32 nt, Artificial Sequence
  Synthetic
uauaugucugcgcgccacauggcgcuguccaa

SEQ ID NO: 5944 - RNA, 32 nt, Artificial Sequence
  Synthetic
auaugucugcgcgccacauggcgcuguccaag

SEQ ID NO: 5945 - RNA, 32 nt, Artificial Sequence
  Synthetic
uaugucugcgcgccacauggcgcuguccaagg

SEQ ID NO: 5946 - RNA, 32 nt, Artificial Sequence
  Synthetic
augucugcgcgccacauggcgcuguccaaggc

SEQ ID NO: 5947 - RNA, 32 nt, Artificial Sequence
  Synthetic
ugucugcgcgccacauggcgcuguccaaggcc

SEQ ID NO: 5948 - RNA, 32 nt, Artificial Sequence
  Synthetic
gucugcgcgccacauggcgcuguccaaggccu

SEQ ID NO: 5949 - RNA, 32 nt, Artificial Sequence
  Synthetic
ucugcgcgccacauggcgcuguccaaggccuu

SEQ ID NO: 5950 - RNA, 32 nt, Artificial Sequence
  Synthetic
cugcgcgccacauggcgcuguccaaggccuuu

SEQ ID NO: 5951 - RNA, 32 nt, Artificial Sequence
  Synthetic
ugcgcgccacauggcgcuguccaaggccuuuc

SEQ ID NO: 5952 - RNA, 32 nt, Artificial Sequence
  Synthetic
gcgcgccacauggcgcuguccaaggccuuucc

SEQ ID NO: 5953 - RNA, 32 nt, Artificial Sequence
  Synthetic
cgcgccacauggcgcuguccaaggccuuucca

SEQ ID NO: 5954 - RNA, 32 nt, Artificial Sequence
  Synthetic
gcgccacauggcgcuguccaaggccuuuccag

SEQ ID NO: 5955 - RNA, 32 nt, Artificial Sequence
  Synthetic
cgccacauggcgcuguccaaggccuuuccaga

SEQ ID NO: 5956 - RNA, 32 nt, Artificial Sequence
  Synthetic
gccacauggcgcuguccaaggccuuuccagag

SEQ ID NO: 5957 - RNA, 32 nt, Artificial Sequence
  Synthetic
ccacauggcgcuguccaaggccuuuccagagc

SEQ ID NO: 5958 - RNA, 32 nt, Artificial Sequence
  Synthetic
cacauggcgcuguccaaggccuuuccagagca

SEQ ID NO: 5959 - RNA, 32 nt, Artificial Sequence
  Synthetic
acauggcgcuguccaaggccuuuccagagcac

SEQ ID NO: 5960 - RNA, 32 nt, Artificial Sequence
  Synthetic
cauggcgcuguccaaggccuuuccagagcacu

SEQ ID NO: 5961 - RNA, 32 nt, Artificial Sequence
  Synthetic
auggcgcuguccaaggccuuuccagagcacuu

SEQ ID NO: 5962 - RNA, 32 nt, Artificial Sequence
  Synthetic
uggcgcuguccaaggccuuuccagagcacuuc

SEQ ID NO: 5963 - RNA, 32 nt, Artificial Sequence
  Synthetic
ggcgcuguccaaggccuuuccagagcacuuca

SEQ ID NO: 5964 - RNA, 32 nt, Artificial Sequence
  Synthetic
gcgcuguccaaggccuuuccagagcacuucac

SEQ ID NO: 5965 - RNA, 32 nt, Artificial Sequence
  Synthetic
cgcuguccaaggccuuuccagagcacuucacc

SEQ ID NO: 5966 - RNA, 32 nt, Artificial Sequence
  Synthetic
gcuguccaaggccuuuccagagcacuucaccu

SEQ ID NO: 5967 - RNA, 32 nt, Artificial Sequence
  Synthetic
cuguccaaggccuuuccagagcacuucaccua

SEQ ID NO: 5968 - RNA, 32 nt, Artificial Sequence
  Synthetic
uguccaaggccuuuccagagcacuucaccuac

SEQ ID NO: 5969 - RNA, 32 nt, Artificial Sequence
  Synthetic
guccaaggccuuuccagagcacuucaccuacg

SEQ ID NO: 5970 - RNA, 32 nt, Artificial Sequence
  Synthetic
uccaaggccuuuccagagcacuucaccuacga

SEQ ID NO: 5971 - RNA, 32 nt, Artificial Sequence
  Synthetic
ccaaggccuuuccagagcacuucaccuacgag

SEQ ID NO: 5972 - RNA, 32 nt, Artificial Sequence
  Synthetic
caaggccuuuccagagcacuucaccuacgagc

SEQ ID NO: 5973 - RNA, 32 nt, Artificial Sequence
  Synthetic
aaggccuuuccagagcacuucaccuacgagcc

SEQ ID NO: 5974 - RNA, 32 nt, Artificial Sequence
  Synthetic
aggccuuuccagagcacuucaccuacgagccc

SEQ ID NO: 5975 - RNA, 32 nt, Artificial Sequence
  Synthetic
ggccuuuccagagcacuucaccuacgagccca

SEQ ID NO: 5976 - RNA, 32 nt, Artificial Sequence
  Synthetic
gccuuuccagagcacuucaccuacgagcccaa

SEQ ID NO: 5977 - RNA, 32 nt, Artificial Sequence
  Synthetic
ccuuuccagagcacuucaccuacgagcccaac

SEQ ID NO: 5978 - RNA, 32 nt, Artificial Sequence
  Synthetic
cuuuccagagcacuucaccuacgagcccaacg

SEQ ID NO: 5979 - RNA, 32 nt, Artificial Sequence
  Synthetic
uuuccagagcacuucaccuacgagcccaacga

SEQ ID NO: 5980 - RNA, 32 nt, Artificial Sequence
  Synthetic
uuccagagcacuucaccuacgagcccaacgag

SEQ ID NO: 5981 - RNA, 32 nt, Artificial Sequence
  Synthetic
uccagagcacuucaccuacgagcccaacgagg

SEQ ID NO: 5982 - RNA, 32 nt, Artificial Sequence
  Synthetic
ccagagcacuucaccuacgagcccaacgaggc

SEQ ID NO: 5983 - RNA, 32 nt, Artificial Sequence
  Synthetic
cagagcacuucaccuacgagcccaacgaggcg

SEQ ID NO: 5984 - RNA, 32 nt, Artificial Sequence
  Synthetic
agagcacuucaccuacgagcccaacgaggcgg

SEQ ID NO: 5985 - RNA, 32 nt, Artificial Sequence
  Synthetic
gagcacuucaccuacgagcccaacgaggcgga

SEQ ID NO: 5986 - RNA, 32 nt, Artificial Sequence
  Synthetic
agcacuucaccuacgagcccaacgaggcggau

SEQ ID NO: 5987 - RNA, 32 nt, Artificial Sequence
  Synthetic
gcacuucaccuacgagcccaacgaggcggaug

SEQ ID NO: 5988 - RNA, 32 nt, Artificial Sequence
  Synthetic
cacuucaccuacgagcccaacgaggcggaugc

SEQ ID NO: 5989 - RNA, 32 nt, Artificial Sequence
  Synthetic
acuucaccuacgagcccaacgaggcggaugcg

SEQ ID NO: 5990 - RNA, 32 nt, Artificial Sequence
  Synthetic
cuucaccuacgagcccaacgaggcggaugcgg

SEQ ID NO: 5991 - RNA, 32 nt, Artificial Sequence
  Synthetic
uucaccuacgagcccaacgaggcggaugcggc

SEQ ID NO: 5992 - RNA, 32 nt, Artificial Sequence
  Synthetic
ucaccuacgagcccaacgaggcggaugcggcc

SEQ ID NO: 5993 - RNA, 32 nt, Artificial Sequence
  Synthetic
caccuacgagcccaacgaggcggaugcggccc

SEQ ID NO: 5994 - RNA, 32 nt, Artificial Sequence
  Synthetic
accuacgagcccaacgaggcggaugcggccca

SEQ ID NO: 5995 - RNA, 32 nt, Artificial Sequence
  Synthetic
ccuacgagcccaacgaggcggaugcggcccag

SEQ ID NO: 5996 - RNA, 32 nt, Artificial Sequence
  Synthetic
cuacgagcccaacgaggcggaugcggcccagg

SEQ ID NO: 5997 - RNA, 32 nt, Artificial Sequence
  Synthetic
uacgagcccaacgaggcggaugcggcccaggg

SEQ ID NO: 5998 - RNA, 32 nt, Artificial Sequence
  Synthetic
acgagcccaacgaggcggaugcggcccagggg

SEQ ID NO: 5999 - RNA, 32 nt, Artificial Sequence
  Synthetic
cgagcccaacgaggcggaugcggcccaggggu

SEQ ID NO: 6000 - RNA, 32 nt, Artificial Sequence
  Synthetic
gagcccaacgaggcggaugcggcccaggggua

SEQ ID NO: 6001 - RNA, 32 nt, Artificial Sequence
  Synthetic
agcccaacgaggcggaugcggcccagggguac

SEQ ID NO: 6002 - RNA, 32 nt, Artificial Sequence
  Synthetic
gcccaacgaggcggaugcggcccagggguacc

SEQ ID NO: 6003 - RNA, 32 nt, Artificial Sequence
  Synthetic
cccaacgaggcggaugcggcccagggguaccg

SEQ ID NO: 6004 - RNA, 32 nt, Artificial Sequence
  Synthetic
ccaacgaggcggaugcggcccagggguaccgc

SEQ ID NO: 6005 - RNA, 32 nt, Artificial Sequence
  Synthetic
caacgaggcggaugcggcccagggguaccgcu

SEQ ID NO: 6006 - RNA, 32 nt, Artificial Sequence
  Synthetic
aacgaggcggaugcggcccagggguaccgcua

SEQ ID NO: 6007 - RNA, 32 nt, Artificial Sequence
  Synthetic
acgaggcggaugcggcccagggguaccgcuac

SEQ ID NO: 6008 - RNA, 32 nt, Artificial Sequence
  Synthetic
cgaggcggaugcggcccagggguaccgcuacc

SEQ ID NO: 6009 - RNA, 32 nt, Artificial Sequence
  Synthetic
gaggcggaugcggcccagggguaccgcuaccc

SEQ ID NO: 6010 - RNA, 32 nt, Artificial Sequence
  Synthetic
aggcggaugcggcccagggguaccgcuaccca

SEQ ID NO: 6011 - RNA, 32 nt, Artificial Sequence
  Synthetic
ggcggaugcggcccagggguaccgcuacccac

SEQ ID NO: 6012 - RNA, 32 nt, Artificial Sequence
  Synthetic
gcggaugcggcccagggguaccgcuacccacg

SEQ ID NO: 6013 - RNA, 32 nt, Artificial Sequence
  Synthetic
cggaugcggcccagggguaccgcuacccacgg

SEQ ID NO: 6014 - RNA, 32 nt, Artificial Sequence
  Synthetic
ggaugcggcccagggguaccgcuacccacggc

SEQ ID NO: 6015 - RNA, 32 nt, Artificial Sequence
  Synthetic
gaugcggcccagggguaccgcuacccacggcc

SEQ ID NO: 6016 - RNA, 32 nt, Artificial Sequence
  Synthetic
augcggcccagggguaccgcuacccacggcca

SEQ ID NO: 6017 - RNA, 32 nt, Artificial Sequence
  Synthetic
ugcggcccagggguaccgcuacccacggccag

SEQ ID NO: 6018 - RNA, 32 nt, Artificial Sequence
  Synthetic
gcggcccagggguaccgcuacccacggccagc

SEQ ID NO: 6019 - RNA, 32 nt, Artificial Sequence
  Synthetic
cggcccagggguaccgcuacccacggccagcc

SEQ ID NO: 6020 - RNA, 32 nt, Artificial Sequence
  Synthetic
ggcccagggguaccgcuacccacggccagccu

SEQ ID NO: 6021 - RNA, 32 nt, Artificial Sequence
  Synthetic
gcccagggguaccgcuacccacggccagccuc

SEQ ID NO: 6022 - RNA, 32 nt, Artificial Sequence
  Synthetic
cccagggguaccgcuacccacggccagccucg

SEQ ID NO: 6023 - RNA, 32 nt, Artificial Sequence
  Synthetic
ccagggguaccgcuacccacggccagccucgg

SEQ ID NO: 6024 - RNA, 32 nt, Artificial Sequence
  Synthetic
cagggguaccgcuacccacggccagccucggu

SEQ ID NO: 6025 - RNA, 32 nt, Artificial Sequence
  Synthetic
agggguaccgcuacccacggccagccucggug

SEQ ID NO: 6026 - RNA, 32 nt, Artificial Sequence
  Synthetic
gggguaccgcuacccacggccagccucggugc

SEQ ID NO: 6027 - RNA, 32 nt, Artificial Sequence
  Synthetic
ggguaccgcuacccacggccagccucggugcc

SEQ ID NO: 6028 - RNA, 32 nt, Artificial Sequence
  Synthetic
gguaccgcuacccacggccagccucggugcca

SEQ ID NO: 6029 - RNA, 32 nt, Artificial Sequence
  Synthetic
guaccgcuacccacggccagccucggugccac

SEQ ID NO: 6030 - RNA, 32 nt, Artificial Sequence
  Synthetic
uaccgcuacccacggccagccucggugccacc

SEQ ID NO: 6031 - RNA, 32 nt, Artificial Sequence
  Synthetic
accgcuacccacggccagccucggugccaccg

SEQ ID NO: 6032 - RNA, 32 nt, Artificial Sequence
  Synthetic
ccgcuacccacggccagccucggugccaccgu

SEQ ID NO: 6033 - RNA, 32 nt, Artificial Sequence
  Synthetic
cgcuacccacggccagccucggugccaccguc

SEQ ID NO: 6034 - RNA, 32 nt, Artificial Sequence
  Synthetic
gcuacccacggccagccucggugccaccgucg

SEQ ID NO: 6035 - RNA, 32 nt, Artificial Sequence
  Synthetic
cuacccacggccagccucggugccaccgucgc

SEQ ID NO: 6036 - RNA, 32 nt, Artificial Sequence
  Synthetic
uacccacggccagccucggugccaccgucgcc

SEQ ID NO: 6037 - RNA, 32 nt, Artificial Sequence
  Synthetic
acccacggccagccucggugccaccgucgccc

SEQ ID NO: 6038 - RNA, 32 nt, Artificial Sequence
  Synthetic
cccacggccagccucggugccaccgucgcccu

SEQ ID NO: 6039 - RNA, 32 nt, Artificial Sequence
  Synthetic
ccacggccagccucggugccaccgucgcccuc

SEQ ID NO: 6040 - RNA, 32 nt, Artificial Sequence
  Synthetic
cacggccagccucggugccaccgucgcccucg

SEQ ID NO: 6041 - RNA, 32 nt, Artificial Sequence
  Synthetic
acggccagccucggugccaccgucgcccucgc

SEQ ID NO: 6042 - RNA, 32 nt, Artificial Sequence
  Synthetic
cggccagccucggugccaccgucgcccucgcu

SEQ ID NO: 6043 - RNA, 32 nt, Artificial Sequence
  Synthetic
ggccagccucggugccaccgucgcccucgcug

SEQ ID NO: 6044 - RNA, 32 nt, Artificial Sequence
  Synthetic
gccagccucggugccaccgucgcccucgcugu

SEQ ID NO: 6045 - RNA, 32 nt, Artificial Sequence
  Synthetic
ccagccucggugccaccgucgcccucgcuguc

SEQ ID NO: 6046 - RNA, 32 nt, Artificial Sequence
  Synthetic
cagccucggugccaccgucgcccucgcuguca

SEQ ID NO: 6047 - RNA, 32 nt, Artificial Sequence
  Synthetic
agccucggugccaccgucgcccucgcugucac

SEQ ID NO: 6048 - RNA, 32 nt, Artificial Sequence
  Synthetic
gccucggugccaccgucgcccucgcugucacg

SEQ ID NO: 6049 - RNA, 32 nt, Artificial Sequence
  Synthetic
ccucggugccaccgucgcccucgcugucacga

SEQ ID NO: 6050 - RNA, 32 nt, Artificial Sequence
  Synthetic
cucggugccaccgucgcccucgcugucacgac

SEQ ID NO: 6051 - RNA, 32 nt, Artificial Sequence
  Synthetic
ucggugccaccgucgcccucgcugucacgaca

SEQ ID NO: 6052 - RNA, 32 nt, Artificial Sequence
  Synthetic
cggugccaccgucgcccucgcugucacgacac

SEQ ID NO: 6053 - RNA, 32 nt, Artificial Sequence
  Synthetic
ggugccaccgucgcccucgcugucacgacacu

SEQ ID NO: 6054 - RNA, 32 nt, Artificial Sequence
  Synthetic
gugccaccgucgcccucgcugucacgacacuc

SEQ ID NO: 6055 - RNA, 32 nt, Artificial Sequence
  Synthetic
ugccaccgucgcccucgcugucacgacacucc

SEQ ID NO: 6056 - RNA, 32 nt, Artificial Sequence
  Synthetic
gccaccgucgcccucgcugucacgacacucca

SEQ ID NO: 6057 - RNA, 32 nt, Artificial Sequence
  Synthetic
ccaccgucgcccucgcugucacgacacuccag

SEQ ID NO: 6058 - RNA, 32 nt, Artificial Sequence
  Synthetic
caccgucgcccucgcugucacgacacuccagc

SEQ ID NO: 6059 - RNA, 32 nt, Artificial Sequence
  Synthetic
accgucgcccucgcugucacgacacuccagcc

SEQ ID NO: 6060 - RNA, 32 nt, Artificial Sequence
  Synthetic
ccgucgcccucgcugucacgacacuccagccc

SEQ ID NO: 6061 - RNA, 32 nt, Artificial Sequence
  Synthetic
cgucgcccucgcugucacgacacuccagcccg

SEQ ID NO: 6062 - RNA, 32 nt, Artificial Sequence
  Synthetic
gucgcccucgcugucacgacacuccagcccgc

SEQ ID NO: 6063 - RNA, 32 nt, Artificial Sequence
  Synthetic
ucgcccucgcugucacgacacuccagcccgca

SEQ ID NO: 6064 - RNA, 32 nt, Artificial Sequence
  Synthetic
cgcccucgcugucacgacacuccagcccgcac

SEQ ID NO: 6065 - RNA, 32 nt, Artificial Sequence
  Synthetic
gcccucgcugucacgacacuccagcccgcacc

SEQ ID NO: 6066 - RNA, 32 nt, Artificial Sequence
  Synthetic
cccucgcugucacgacacuccagcccgcacca

SEQ ID NO: 6067 - RNA, 32 nt, Artificial Sequence
  Synthetic
ccucgcugucacgacacuccagcccgcaccag

SEQ ID NO: 6068 - RNA, 32 nt, Artificial Sequence
  Synthetic
cucgcugucacgacacuccagcccgcaccaga

SEQ ID NO: 6069 - RNA, 32 nt, Artificial Sequence
  Synthetic
ucgcugucacgacacuccagcccgcaccagag

SEQ ID NO: 6070 - RNA, 32 nt, Artificial Sequence
  Synthetic
cgcugucacgacacuccagcccgcaccagagu

SEQ ID NO: 6071 - RNA, 32 nt, Artificial Sequence
  Synthetic
gcugucacgacacuccagcccgcaccagagug

SEQ ID NO: 6072 - RNA, 32 nt, Artificial Sequence
  Synthetic
cugucacgacacuccagcccgcaccagaguga

SEQ ID NO: 6073 - RNA, 32 nt, Artificial Sequence
  Synthetic
ugucacgacacuccagcccgcaccagagugag

SEQ ID NO: 6074 - RNA, 32 nt, Artificial Sequence
  Synthetic
gucacgacacuccagcccgcaccagagugagg

SEQ ID NO: 6075 - RNA, 32 nt, Artificial Sequence
  Synthetic
ucacgacacuccagcccgcaccagagugagga

SEQ ID NO: 6076 - RNA, 32 nt, Artificial Sequence
  Synthetic
cacgacacuccagcccgcaccagagugaggac

SEQ ID NO: 6077 - RNA, 32 nt, Artificial Sequence
  Synthetic
acgacacuccagcccgcaccagagugaggacg

SEQ ID NO: 6078 - RNA, 32 nt, Artificial Sequence
  Synthetic
cgacacuccagcccgcaccagagugaggacga

SEQ ID NO: 6079 - RNA, 32 nt, Artificial Sequence
  Synthetic
gacacuccagcccgcaccagagugaggacgag

SEQ ID NO: 6080 - RNA, 32 nt, Artificial Sequence
  Synthetic
acacuccagcccgcaccagagugaggacgagg

SEQ ID NO: 6081 - RNA, 32 nt, Artificial Sequence
  Synthetic
cacuccagcccgcaccagagugaggacgagga

SEQ ID NO: 6082 - RNA, 32 nt, Artificial Sequence
  Synthetic
acuccagcccgcaccagagugaggacgaggag

SEQ ID NO: 6083 - RNA, 32 nt, Artificial Sequence
  Synthetic
cuccagcccgcaccagagugaggacgaggagg

SEQ ID NO: 6084 - RNA, 32 nt, Artificial Sequence
  Synthetic
uccagcccgcaccagagugaggacgaggagga

SEQ ID NO: 6085 - RNA, 32 nt, Artificial Sequence
  Synthetic
ccagcccgcaccagagugaggacgaggaggau

SEQ ID NO: 6086 - RNA, 32 nt, Artificial Sequence
  Synthetic
cagcccgcaccagagugaggacgaggaggauc

SEQ ID NO: 6087 - RNA, 32 nt, Artificial Sequence
  Synthetic
agcccgcaccagagugaggacgaggaggaucc

SEQ ID NO: 6088 - RNA, 32 nt, Artificial Sequence
  Synthetic
gcccgcaccagagugaggacgaggaggauccc

SEQ ID NO: 6089 - RNA, 32 nt, Artificial Sequence
  Synthetic
cccgcaccagagugaggacgaggaggaucccc

SEQ ID NO: 6090 - RNA, 32 nt, Artificial Sequence
  Synthetic
ccgcaccagagugaggacgaggaggauccccg

SEQ ID NO: 6091 - RNA, 32 nt, Artificial Sequence
  Synthetic
cgcaccagagugaggacgaggaggauccccgg

SEQ ID NO: 6092 - RNA, 32 nt, Artificial Sequence
  Synthetic
gcaccagagugaggacgaggaggauccccgga

SEQ ID NO: 6093 - RNA, 32 nt, Artificial Sequence
  Synthetic
caccagagugaggacgaggaggauccccggaa

SEQ ID NO: 6094 - RNA, 32 nt, Artificial Sequence
  Synthetic
accagagugaggacgaggaggauccccggaac

SEQ ID NO: 6095 - RNA, 32 nt, Artificial Sequence
  Synthetic
ccagagugaggacgaggaggauccccggaacg

SEQ ID NO: 6096 - RNA, 32 nt, Artificial Sequence
  Synthetic
cagagugaggacgaggaggauccccggaacgg

SEQ ID NO: 6097 - RNA, 32 nt, Artificial Sequence
  Synthetic
agagugaggacgaggaggauccccggaacggg

SEQ ID NO: 6098 - RNA, 32 nt, Artificial Sequence
  Synthetic
gagugaggacgaggaggauccccggaacgggc

SEQ ID NO: 6099 - RNA, 32 nt, Artificial Sequence
  Synthetic
agugaggacgaggaggauccccggaacgggcc

SEQ ID NO: 6100 - RNA, 32 nt, Artificial Sequence
  Synthetic
gugaggacgaggaggauccccggaacgggccg

SEQ ID NO: 6101 - RNA, 32 nt, Artificial Sequence
  Synthetic
ugaggacgaggaggauccccggaacgggccgc

SEQ ID NO: 6102 - RNA, 32 nt, Artificial Sequence
  Synthetic
gaggacgaggaggauccccggaacgggccgcu

SEQ ID NO: 6103 - RNA, 32 nt, Artificial Sequence
  Synthetic
aggacgaggaggauccccggaacgggccgcug

SEQ ID NO: 6104 - RNA, 32 nt, Artificial Sequence
  Synthetic
ggacgaggaggauccccggaacgggccgcugg

SEQ ID NO: 6105 - RNA, 32 nt, Artificial Sequence
  Synthetic
gacgaggaggauccccggaacgggccgcugga

SEQ ID NO: 6106 - RNA, 32 nt, Artificial Sequence
  Synthetic
acgaggaggauccccggaacgggccgcuggag

SEQ ID NO: 6107 - RNA, 32 nt, Artificial Sequence
  Synthetic
cgaggaggauccccggaacgggccgcuggagg

SEQ ID NO: 6108 - RNA, 32 nt, Artificial Sequence
  Synthetic
gaggaggauccccggaacgggccgcuggagga

SEQ ID NO: 6109 - RNA, 32 nt, Artificial Sequence
  Synthetic
aggaggauccccggaacgggccgcuggaggaa

SEQ ID NO: 6110 - RNA, 32 nt, Artificial Sequence
  Synthetic
ggaggauccccggaacgggccgcuggaggaag

SEQ ID NO: 6111 - RNA, 32 nt, Artificial Sequence
  Synthetic
gaggauccccggaacgggccgcuggaggaaga

SEQ ID NO: 6112 - RNA, 32 nt, Artificial Sequence
  Synthetic
aggauccccggaacgggccgcuggaggaagac

SEQ ID NO: 6113 - RNA, 32 nt, Artificial Sequence
  Synthetic
ggauccccggaacgggccgcuggaggaagacg

SEQ ID NO: 6114 - RNA, 32 nt, Artificial Sequence
  Synthetic
gauccccggaacgggccgcuggaggaagacgg

SEQ ID NO: 6115 - RNA, 32 nt, Artificial Sequence
  Synthetic
auccccggaacgggccgcuggaggaagacggc

SEQ ID NO: 6116 - RNA, 32 nt, Artificial Sequence
  Synthetic
uccccggaacgggccgcuggaggaagacggcg

SEQ ID NO: 6117 - RNA, 32 nt, Artificial Sequence
  Synthetic
ccccggaacgggccgcuggaggaagacggcga

SEQ ID NO: 6118 - RNA, 32 nt, Artificial Sequence
  Synthetic
cccggaacgggccgcuggaggaagacggcgag

SEQ ID NO: 6119 - RNA, 32 nt, Artificial Sequence
  Synthetic
ccggaacgggccgcuggaggaagacggcgagc

SEQ ID NO: 6120 - RNA, 32 nt, Artificial Sequence
  Synthetic
cggaacgggccgcuggaggaagacggcgagcg

SEQ ID NO: 6121 - RNA, 32 nt, Artificial Sequence
  Synthetic
ggaacgggccgcuggaggaagacggcgagcgc

SEQ ID NO: 6122 - RNA, 32 nt, Artificial Sequence
  Synthetic
gaacgggccgcuggaggaagacggcgagcgcu

SEQ ID NO: 6123 - RNA, 32 nt, Artificial Sequence
  Synthetic
aacgggccgcuggaggaagacggcgagcgcua

SEQ ID NO: 6124 - RNA, 32 nt, Artificial Sequence
  Synthetic
acgggccgcuggaggaagacggcgagcgcuac

SEQ ID NO: 6125 - RNA, 32 nt, Artificial Sequence
  Synthetic
cgggccgcuggaggaagacggcgagcgcuacg

SEQ ID NO: 6126 - RNA, 32 nt, Artificial Sequence
  Synthetic
gggccgcuggaggaagacggcgagcgcuacga

SEQ ID NO: 6127 - RNA, 32 nt, Artificial Sequence
  Synthetic
ggccgcuggaggaagacggcgagcgcuacgau

SEQ ID NO: 6128 - RNA, 32 nt, Artificial Sequence
  Synthetic
gccgcuggaggaagacggcgagcgcuacgaug

SEQ ID NO: 6129 - RNA, 32 nt, Artificial Sequence
  Synthetic
ccgcuggaggaagacggcgagcgcuacgauga

SEQ ID NO: 6130 - RNA, 32 nt, Artificial Sequence
  Synthetic
cgcuggaggaagacggcgagcgcuacgaugag

SEQ ID NO: 6131 - RNA, 32 nt, Artificial Sequence
  Synthetic
gcuggaggaagacggcgagcgcuacgaugagg

SEQ ID NO: 6132 - RNA, 32 nt, Artificial Sequence
  Synthetic
cuggaggaagacggcgagcgcuacgaugagga

SEQ ID NO: 6133 - RNA, 32 nt, Artificial Sequence
  Synthetic
uggaggaagacggcgagcgcuacgaugaggac

SEQ ID NO: 6134 - RNA, 32 nt, Artificial Sequence
  Synthetic
ggaggaagacggcgagcgcuacgaugaggacg

SEQ ID NO: 6135 - RNA, 32 nt, Artificial Sequence
  Synthetic
gaggaagacggcgagcgcuacgaugaggacga

SEQ ID NO: 6136 - RNA, 32 nt, Artificial Sequence
  Synthetic
aggaagacggcgagcgcuacgaugaggacgag

SEQ ID NO: 6137 - RNA, 32 nt, Artificial Sequence
  Synthetic
ggaagacggcgagcgcuacgaugaggacgagg

SEQ ID NO: 6138 - RNA, 32 nt, Artificial Sequence
  Synthetic
gaagacggcgagcgcuacgaugaggacgagga

SEQ ID NO: 6139 - RNA, 32 nt, Artificial Sequence
  Synthetic
aagacggcgagcgcuacgaugaggacgaggag

SEQ ID NO: 6140 - RNA, 32 nt, Artificial Sequence
  Synthetic
agacggcgagcgcuacgaugaggacgaggagg

SEQ ID NO: 6141 - RNA, 32 nt, Artificial Sequence
  Synthetic
gacggcgagcgcuacgaugaggacgaggaggc

SEQ ID NO: 6142 - RNA, 32 nt, Artificial Sequence
  Synthetic
acggcgagcgcuacgaugaggacgaggaggcc

SEQ ID NO: 6143 - RNA, 32 nt, Artificial Sequence
  Synthetic
cggcgagcgcuacgaugaggacgaggaggccg

SEQ ID NO: 6144 - RNA, 32 nt, Artificial Sequence
  Synthetic
ggcgagcgcuacgaugaggacgaggaggccgc

SEQ ID NO: 6145 - RNA, 32 nt, Artificial Sequence
  Synthetic
gcgagcgcuacgaugaggacgaggaggccgcc

SEQ ID NO: 6146 - RNA, 32 nt, Artificial Sequence
  Synthetic
cgagcgcuacgaugaggacgaggaggccgcca

SEQ ID NO: 6147 - RNA, 32 nt, Artificial Sequence
  Synthetic
gagcgcuacgaugaggacgaggaggccgccaa

SEQ ID NO: 6148 - RNA, 32 nt, Artificial Sequence
  Synthetic
gcuacgaugaggacgaggaggccgccaaggac

SEQ ID NO: 6149 - RNA, 32 nt, Artificial Sequence
  Synthetic
cuacgaugaggacgaggaggccgccaaggacc

SEQ ID NO: 6150 - RNA, 32 nt, Artificial Sequence
  Synthetic
uacgaugaggacgaggaggccgccaaggaccg

SEQ ID NO: 6151 - RNA, 32 nt, Artificial Sequence
  Synthetic
acgaugaggacgaggaggccgccaaggaccgg

SEQ ID NO: 6152 - RNA, 32 nt, Artificial Sequence
  Synthetic
cgaugaggacgaggaggccgccaaggaccggc

SEQ ID NO: 6153 - RNA, 32 nt, Artificial Sequence
  Synthetic
gaugaggacgaggaggccgccaaggaccggcg

SEQ ID NO: 6154 - RNA, 32 nt, Artificial Sequence
  Synthetic
augaggacgaggaggccgccaaggaccggcgc

SEQ ID NO: 6155 - RNA, 32 nt, Artificial Sequence
  Synthetic
ugaggacgaggaggccgccaaggaccggcgca

SEQ ID NO: 6156 - RNA, 32 nt, Artificial Sequence
  Synthetic
gaggacgaggaggccgccaaggaccggcgcaa

SEQ ID NO: 6157 - RNA, 32 nt, Artificial Sequence
  Synthetic
aggacgaggaggccgccaaggaccggcgcaac

SEQ ID NO: 6158 - RNA, 32 nt, Artificial Sequence
  Synthetic
ggacgaggaggccgccaaggaccggcgcaaca

SEQ ID NO: 6159 - RNA, 32 nt, Artificial Sequence
  Synthetic
gacgaggaggccgccaaggaccggcgcaacau

SEQ ID NO: 6160 - RNA, 32 nt, Artificial Sequence
  Synthetic
acgaggaggccgccaaggaccggcgcaacauc

SEQ ID NO: 6161 - RNA, 32 nt, Artificial Sequence
  Synthetic
cgaggaggccgccaaggaccggcgcaacaucc

SEQ ID NO: 6162 - RNA, 32 nt, Artificial Sequence
  Synthetic
gaggaggccgccaaggaccggcgcaacauccg

SEQ ID NO: 6163 - RNA, 32 nt, Artificial Sequence
  Synthetic
aggaggccgccaaggaccggcgcaacauccgu

SEQ ID NO: 6164 - RNA, 32 nt, Artificial Sequence
  Synthetic
ggaggccgccaaggaccggcgcaacauccgug

SEQ ID NO: 6165 - RNA, 32 nt, Artificial Sequence
  Synthetic
gaggccgccaaggaccggcgcaacauccgugc

SEQ ID NO: 6166 - RNA, 32 nt, Artificial Sequence
  Synthetic
aggccgccaaggaccggcgcaacauccgugca

SEQ ID NO: 6167 - RNA, 32 nt, Artificial Sequence
  Synthetic
ggccgccaaggaccggcgcaacauccgugcac

SEQ ID NO: 6168 - RNA, 32 nt, Artificial Sequence
  Synthetic
gccgccaaggaccggcgcaacauccgugcacc

SEQ ID NO: 6169 - RNA, 32 nt, Artificial Sequence
  Synthetic
ccgccaaggaccggcgcaacauccgugcacca

SEQ ID NO: 6170 - RNA, 32 nt, Artificial Sequence
  Synthetic
cgccaaggaccggcgcaacauccgugcaccag

SEQ ID NO: 6171 - RNA, 32 nt, Artificial Sequence
  Synthetic
gccaaggaccggcgcaacauccgugcaccaga

SEQ ID NO: 6172 - RNA, 32 nt, Artificial Sequence
  Synthetic
ccaaggaccggcgcaacauccgugcaccagag

SEQ ID NO: 6173 - RNA, 32 nt, Artificial Sequence
  Synthetic
caaggaccggcgcaacauccgugcaccagagu

SEQ ID NO: 6174 - RNA, 32 nt, Artificial Sequence
  Synthetic
aaggaccggcgcaacauccgugcaccagagug

SEQ ID NO: 6175 - RNA, 32 nt, Artificial Sequence
  Synthetic
aggaccggcgcaacauccgugcaccagagugg

SEQ ID NO: 6176 - RNA, 32 nt, Artificial Sequence
  Synthetic
ggaccggcgcaacauccgugcaccagaguggc

SEQ ID NO: 6177 - RNA, 32 nt, Artificial Sequence
  Synthetic
gaccggcgcaacauccgugcaccagaguggcc

SEQ ID NO: 6178 - RNA, 32 nt, Artificial Sequence
  Synthetic
accggcgcaacauccgugcaccagaguggccg

SEQ ID NO: 6179 - RNA, 32 nt, Artificial Sequence
  Synthetic
ccggcgcaacauccgugcaccagaguggccgc

SEQ ID NO: 6180 - RNA, 32 nt, Artificial Sequence
  Synthetic
cggcgcaacauccgugcaccagaguggccgcg

SEQ ID NO: 6181 - RNA, 32 nt, Artificial Sequence
  Synthetic
ggcgcaacauccgugcaccagaguggccgcgc

SEQ ID NO: 6182 - RNA, 32 nt, Artificial Sequence
  Synthetic
gcgcaacauccgugcaccagaguggccgcgcc

SEQ ID NO: 6183 - RNA, 32 nt, Artificial Sequence
  Synthetic
cgcaacauccgugcaccagaguggccgcgccg

SEQ ID NO: 6184 - RNA, 32 nt, Artificial Sequence
  Synthetic
gcaacauccgugcaccagaguggccgcgccga

SEQ ID NO: 6185 - RNA, 32 nt, Artificial Sequence
  Synthetic
caacauccgugcaccagaguggccgcgccgag

SEQ ID NO: 6186 - RNA, 32 nt, Artificial Sequence
  Synthetic
aacauccgugcaccagaguggccgcgccgagc

SEQ ID NO: 6187 - RNA, 32 nt, Artificial Sequence
  Synthetic
acauccgugcaccagaguggccgcgccgagcg

SEQ ID NO: 6188 - RNA, 32 nt, Artificial Sequence
  Synthetic
cauccgugcaccagaguggccgcgccgagcgu

SEQ ID NO: 6189 - RNA, 32 nt, Artificial Sequence
  Synthetic
auccgugcaccagaguggccgcgccgagcguc

SEQ ID NO: 6190 - RNA, 32 nt, Artificial Sequence
  Synthetic
uccgugcaccagaguggccgcgccgagcgucc

SEQ ID NO: 6191 - RNA, 32 nt, Artificial Sequence
  Synthetic
ccgugcaccagaguggccgcgccgagcguccu

SEQ ID NO: 6192 - RNA, 32 nt, Artificial Sequence
  Synthetic
cgugcaccagaguggccgcgccgagcguccug

SEQ ID NO: 6193 - RNA, 32 nt, Artificial Sequence
  Synthetic
gugcaccagaguggccgcgccgagcguccugc

SEQ ID NO: 6194 - RNA, 32 nt, Artificial Sequence
  Synthetic
ugcaccagaguggccgcgccgagcguccugca

SEQ ID NO: 6195 - RNA, 32 nt, Artificial Sequence
  Synthetic
gcaccagaguggccgcgccgagcguccugcac

SEQ ID NO: 6196 - RNA, 32 nt, Artificial Sequence
  Synthetic
caccagaguggccgcgccgagcguccugcacc

SEQ ID NO: 6197 - RNA, 32 nt, Artificial Sequence
  Synthetic
accagaguggccgcgccgagcguccugcaccu

SEQ ID NO: 6198 - RNA, 32 nt, Artificial Sequence
  Synthetic
ccagaguggccgcgccgagcguccugcaccuc

SEQ ID NO: 6199 - RNA, 32 nt, Artificial Sequence
  Synthetic
cagaguggccgcgccgagcguccugcaccucc

SEQ ID NO: 6200 - RNA, 32 nt, Artificial Sequence
  Synthetic
agaguggccgcgccgagcguccugcaccuccu

SEQ ID NO: 6201 - RNA, 32 nt, Artificial Sequence
  Synthetic
gaguggccgcgccgagcguccugcaccuccuc

SEQ ID NO: 6202 - RNA, 32 nt, Artificial Sequence
  Synthetic
aguggccgcgccgagcguccugcaccuccucc

SEQ ID NO: 6203 - RNA, 32 nt, Artificial Sequence
  Synthetic
guggccgcgccgagcguccugcaccuccucca

SEQ ID NO: 6204 - RNA, 32 nt, Artificial Sequence
  Synthetic
uggccgcgccgagcguccugcaccuccuccac

SEQ ID NO: 6205 - RNA, 32 nt, Artificial Sequence
  Synthetic
ggccgcgccgagcguccugcaccuccuccacc

SEQ ID NO: 6206 - RNA, 32 nt, Artificial Sequence
  Synthetic
gccgcgccgagcguccugcaccuccuccacca

SEQ ID NO: 6207 - RNA, 32 nt, Artificial Sequence
  Synthetic
ccgcgccgagcguccugcaccuccuccaccag

SEQ ID NO: 6208 - RNA, 32 nt, Artificial Sequence
  Synthetic
cgcgccgagcguccugcaccuccuccaccagc

SEQ ID NO: 6209 - RNA, 32 nt, Artificial Sequence
  Synthetic
gcgccgagcguccugcaccuccuccaccagcg

SEQ ID NO: 6210 - RNA, 32 nt, Artificial Sequence
  Synthetic
cgccgagcguccugcaccuccuccaccagcgg

SEQ ID NO: 6211 - RNA, 32 nt, Artificial Sequence
  Synthetic
gccgagcguccugcaccuccuccaccagcggc

SEQ ID NO: 6212 - RNA, 32 nt, Artificial Sequence
  Synthetic
ccgagcguccugcaccuccuccaccagcggca

SEQ ID NO: 6213 - RNA, 32 nt, Artificial Sequence
  Synthetic
cgagcguccugcaccuccuccaccagcggcag

SEQ ID NO: 6214 - RNA, 32 nt, Artificial Sequence
  Synthetic
gagcguccugcaccuccuccaccagcggcagc

SEQ ID NO: 6215 - RNA, 32 nt, Artificial Sequence
  Synthetic
agcguccugcaccuccuccaccagcggcagca

SEQ ID NO: 6216 - RNA, 32 nt, Artificial Sequence
  Synthetic
gcguccugcaccuccuccaccagcggcagcaa

SEQ ID NO: 6217 - RNA, 32 nt, Artificial Sequence
  Synthetic
cguccugcaccuccuccaccagcggcagcaag

SEQ ID NO: 6218 - RNA, 32 nt, Artificial Sequence
  Synthetic
guccugcaccuccuccaccagcggcagcaagc

SEQ ID NO: 6219 - RNA, 32 nt, Artificial Sequence
  Synthetic
uccugcaccuccuccaccagcggcagcaagcg

SEQ ID NO: 6220 - RNA, 32 nt, Artificial Sequence
  Synthetic
ccugcaccuccuccaccagcggcagcaagcgc

SEQ ID NO: 6221 - RNA, 32 nt, Artificial Sequence
  Synthetic
cugcaccuccuccaccagcggcagcaagcgca

SEQ ID NO: 6222 - RNA, 32 nt, Artificial Sequence
  Synthetic
ugcaccuccuccaccagcggcagcaagcgcaa

SEQ ID NO: 6223 - RNA, 32 nt, Artificial Sequence
  Synthetic
gcaccuccuccaccagcggcagcaagcgcaac

SEQ ID NO: 6224 - RNA, 32 nt, Artificial Sequence
  Synthetic
caccuccuccaccagcggcagcaagcgcaacu

SEQ ID NO: 6225 - RNA, 32 nt, Artificial Sequence
  Synthetic
accuccuccaccagcggcagcaagcgcaacuc

SEQ ID NO: 6226 - RNA, 32 nt, Artificial Sequence
  Synthetic
ccuccuccaccagcggcagcaagcgcaacucu

SEQ ID NO: 6227 - RNA, 32 nt, Artificial Sequence
  Synthetic
cuccuccaccagcggcagcaagcgcaacucug

SEQ ID NO: 6228 - RNA, 32 nt, Artificial Sequence
  Synthetic
uccuccaccagcggcagcaagcgcaacucugu

SEQ ID NO: 6229 - RNA, 32 nt, Artificial Sequence
  Synthetic
ccuccaccagcggcagcaagcgcaacucugug

SEQ ID NO: 6230 - RNA, 32 nt, Artificial Sequence
  Synthetic
cuccaccagcggcagcaagcgcaacucugugg

SEQ ID NO: 6231 - RNA, 32 nt, Artificial Sequence
  Synthetic
uccaccagcggcagcaagcgcaacucugugga

SEQ ID NO: 6232 - RNA, 32 nt, Artificial Sequence
  Synthetic
ccaccagcggcagcaagcgcaacucuguggac

SEQ ID NO: 6233 - RNA, 32 nt, Artificial Sequence
  Synthetic
caccagcggcagcaagcgcaacucuguggaca

SEQ ID NO: 6234 - RNA, 32 nt, Artificial Sequence
  Synthetic
accagcggcagcaagcgcaacucuguggacac

SEQ ID NO: 6235 - RNA, 32 nt, Artificial Sequence
  Synthetic
ccagcggcagcaagcgcaacucuguggacacg

SEQ ID NO: 6236 - RNA, 32 nt, Artificial Sequence
  Synthetic
cagcggcagcaagcgcaacucuguggacacgg

SEQ ID NO: 6237 - RNA, 32 nt, Artificial Sequence
  Synthetic
agcggcagcaagcgcaacucuguggacacggc

SEQ ID NO: 6238 - RNA, 32 nt, Artificial Sequence
  Synthetic
gcggcagcaagcgcaacucuguggacacggcc

SEQ ID NO: 6239 - RNA, 32 nt, Artificial Sequence
  Synthetic
cggcagcaagcgcaacucuguggacacggcca

SEQ ID NO: 6240 - RNA, 32 nt, Artificial Sequence
  Synthetic
ggcagcaagcgcaacucuguggacacggccac

SEQ ID NO: 6241 - RNA, 32 nt, Artificial Sequence
  Synthetic
gcagcaagcgcaacucuguggacacggccacc

SEQ ID NO: 6242 - RNA, 32 nt, Artificial Sequence
  Synthetic
cagcaagcgcaacucuguggacacggccaccu

SEQ ID NO: 6243 - RNA, 32 nt, Artificial Sequence
  Synthetic
agcaagcgcaacucuguggacacggccaccuc

SEQ ID NO: 6244 - RNA, 32 nt, Artificial Sequence
  Synthetic
gcaagcgcaacucuguggacacggccaccucc

SEQ ID NO: 6245 - RNA, 32 nt, Artificial Sequence
  Synthetic
caagcgcaacucuguggacacggccaccucca

SEQ ID NO: 6246 - RNA, 32 nt, Artificial Sequence
  Synthetic
aagcgcaacucuguggacacggccaccuccag

SEQ ID NO: 6247 - RNA, 32 nt, Artificial Sequence
  Synthetic
agcgcaacucuguggacacggccaccuccagc

SEQ ID NO: 6248 - RNA, 32 nt, Artificial Sequence
  Synthetic
gcgcaacucuguggacacggccaccuccagcu

SEQ ID NO: 6249 - RNA, 32 nt, Artificial Sequence
  Synthetic
cgcaacucuguggacacggccaccuccagcuc

SEQ ID NO: 6250 - RNA, 32 nt, Artificial Sequence
  Synthetic
gcaacucuguggacacggccaccuccagcuca

SEQ ID NO: 6251 - RNA, 32 nt, Artificial Sequence
  Synthetic
caacucuguggacacggccaccuccagcucac

SEQ ID NO: 6252 - RNA, 32 nt, Artificial Sequence
  Synthetic
aacucuguggacacggccaccuccagcucacu

SEQ ID NO: 6253 - RNA, 32 nt, Artificial Sequence
  Synthetic
acucuguggacacggccaccuccagcucacuc

SEQ ID NO: 6254 - RNA, 32 nt, Artificial Sequence
  Synthetic
cucuguggacacggccaccuccagcucacuca

SEQ ID NO: 6255 - RNA, 32 nt, Artificial Sequence
  Synthetic
ucuguggacacggccaccuccagcucacucag

SEQ ID NO: 6256 - RNA, 32 nt, Artificial Sequence
  Synthetic
cuguggacacggccaccuccagcucacucagc

SEQ ID NO: 6257 - RNA, 32 nt, Artificial Sequence
  Synthetic
uguggacacggccaccuccagcucacucagca

SEQ ID NO: 6258 - RNA, 32 nt, Artificial Sequence
  Synthetic
guggacacggccaccuccagcucacucagcac

SEQ ID NO: 6259 - RNA, 32 nt, Artificial Sequence
  Synthetic
uggacacggccaccuccagcucacucagcacc

SEQ ID NO: 6260 - RNA, 32 nt, Artificial Sequence
  Synthetic
ggacacggccaccuccagcucacucagcaccc

SEQ ID NO: 6261 - RNA, 32 nt, Artificial Sequence
  Synthetic
gacacggccaccuccagcucacucagcacccc

SEQ ID NO: 6262 - RNA, 32 nt, Artificial Sequence
  Synthetic
acacggccaccuccagcucacucagcaccccg

SEQ ID NO: 6263 - RNA, 32 nt, Artificial Sequence
  Synthetic
cacggccaccuccagcucacucagcaccccga

SEQ ID NO: 6264 - RNA, 32 nt, Artificial Sequence
  Synthetic
acggccaccuccagcucacucagcaccccgag

SEQ ID NO: 6265 - RNA, 32 nt, Artificial Sequence
  Synthetic
cggccaccuccagcucacucagcaccccgagc

SEQ ID NO: 6266 - RNA, 32 nt, Artificial Sequence
  Synthetic
ggccaccuccagcucacucagcaccccgagcg

SEQ ID NO: 6267 - RNA, 32 nt, Artificial Sequence
  Synthetic
gccaccuccagcucacucagcaccccgagcga

SEQ ID NO: 6268 - RNA, 32 nt, Artificial Sequence
  Synthetic
ccaccuccagcucacucagcaccccgagcgag

SEQ ID NO: 6269 - RNA, 32 nt, Artificial Sequence
  Synthetic
caccuccagcucacucagcaccccgagcgagc

SEQ ID NO: 6270 - RNA, 32 nt, Artificial Sequence
  Synthetic
accuccagcucacucagcaccccgagcgagcc

SEQ ID NO: 6271 - RNA, 32 nt, Artificial Sequence
  Synthetic
ccuccagcucacucagcaccccgagcgagccc

SEQ ID NO: 6272 - RNA, 32 nt, Artificial Sequence
  Synthetic
cuccagcucacucagcaccccgagcgagcccc

SEQ ID NO: 6273 - RNA, 32 nt, Artificial Sequence
  Synthetic
uccagcucacucagcaccccgagcgagccccu

SEQ ID NO: 6274 - RNA, 32 nt, Artificial Sequence
  Synthetic
ccagcucacucagcaccccgagcgagccccuc

SEQ ID NO: 6275 - RNA, 32 nt, Artificial Sequence
  Synthetic
cagcucacucagcaccccgagcgagccccuca

SEQ ID NO: 6276 - RNA, 32 nt, Artificial Sequence
  Synthetic
agcucacucagcaccccgagcgagccccucag

SEQ ID NO: 6277 - RNA, 32 nt, Artificial Sequence
  Synthetic
gcucacucagcaccccgagcgagccccucagc

SEQ ID NO: 6278 - RNA, 32 nt, Artificial Sequence
  Synthetic
cucacucagcaccccgagcgagccccucagcc

SEQ ID NO: 6279 - RNA, 32 nt, Artificial Sequence
  Synthetic
ucacucagcaccccgagcgagccccucagccc

SEQ ID NO: 6280 - RNA, 32 nt, Artificial Sequence
  Synthetic
cacucagcaccccgagcgagccccucagcccc

SEQ ID NO: 6281 - RNA, 32 nt, Artificial Sequence
  Synthetic
acucagcaccccgagcgagccccucagcccca

SEQ ID NO: 6282 - RNA, 32 nt, Artificial Sequence
  Synthetic
cucagcaccccgagcgagccccucagccccac

SEQ ID NO: 6283 - RNA, 32 nt, Artificial Sequence
  Synthetic
ucagcaccccgagcgagccccucagccccacc

SEQ ID NO: 6284 - RNA, 32 nt, Artificial Sequence
  Synthetic
cagcaccccgagcgagccccucagccccacca

SEQ ID NO: 6285 - RNA, 32 nt, Artificial Sequence
  Synthetic
agcaccccgagcgagccccucagccccaccag

SEQ ID NO: 6286 - RNA, 32 nt, Artificial Sequence
  Synthetic
gcaccccgagcgagccccucagccccaccagc

SEQ ID NO: 6287 - RNA, 32 nt, Artificial Sequence
  Synthetic
caccccgagcgagccccucagccccaccagcu

SEQ ID NO: 6288 - RNA, 32 nt, Artificial Sequence
  Synthetic
accccgagcgagccccucagccccaccagcuc

SEQ ID NO: 6289 - RNA, 32 nt, Artificial Sequence
  Synthetic
ccccgagcgagccccucagccccaccagcucc

SEQ ID NO: 6290 - RNA, 32 nt, Artificial Sequence
  Synthetic
cccgagcgagccccucagccccaccagcuccc

SEQ ID NO: 6291 - RNA, 32 nt, Artificial Sequence
  Synthetic
ccgagcgagccccucagccccaccagcucccu

SEQ ID NO: 6292 - RNA, 32 nt, Artificial Sequence
  Synthetic
cgagcgagccccucagccccaccagcucccug

SEQ ID NO: 6293 - RNA, 32 nt, Artificial Sequence
  Synthetic
gagcgagccccucagccccaccagcucccugg

SEQ ID NO: 6294 - RNA, 32 nt, Artificial Sequence
  Synthetic
agcgagccccucagccccaccagcucccuggg

SEQ ID NO: 6295 - RNA, 32 nt, Artificial Sequence
  Synthetic
gcgagccccucagccccaccagcucccugggc

SEQ ID NO: 6296 - RNA, 32 nt, Artificial Sequence
  Synthetic
cgagccccucagccccaccagcucccugggcg

SEQ ID NO: 6297 - RNA, 32 nt, Artificial Sequence
  Synthetic
gagccccucagccccaccagcucccugggcga

SEQ ID NO: 6298 - RNA, 32 nt, Artificial Sequence
  Synthetic
agccccucagccccaccagcucccugggcgag

SEQ ID NO: 6299 - RNA, 32 nt, Artificial Sequence
  Synthetic
gccccucagccccaccagcucccugggcgagg

SEQ ID NO: 6300 - RNA, 32 nt, Artificial Sequence
  Synthetic
ccccucagccccaccagcucccugggcgagga

SEQ ID NO: 6301 - RNA, 32 nt, Artificial Sequence
  Synthetic
cccucagccccaccagcucccugggcgaggag

SEQ ID NO: 6302 - RNA, 32 nt, Artificial Sequence
  Synthetic
ccucagccccaccagcucccugggcgaggagc

SEQ ID NO: 6303 - RNA, 32 nt, Artificial Sequence
  Synthetic
cucagccccaccagcucccugggcgaggagcg

SEQ ID NO: 6304 - RNA, 32 nt, Artificial Sequence
  Synthetic
ucagccccaccagcucccugggcgaggagcgu

SEQ ID NO: 6305 - RNA, 32 nt, Artificial Sequence
  Synthetic
cagccccaccagcucccugggcgaggagcgua

SEQ ID NO: 6306 - RNA, 32 nt, Artificial Sequence
  Synthetic
agccccaccagcucccugggcgaggagcguaa

SEQ ID NO: 6307 - RNA, 32 nt, Artificial Sequence
  Synthetic
gccccaccagcucccugggcgaggagcguaac

SEQ ID NO: 6308 - RNA, 32 nt, Artificial Sequence
  Synthetic
ccccaccagcucccugggcgaggagcguaacu

SEQ ID NO: 6309 - RNA, 32 nt, Artificial Sequence
  Synthetic
cccaccagcucccugggcgaggagcguaacua

SEQ ID NO: 6310 - RNA, 32 nt, Artificial Sequence
  Synthetic
ccaccagcucccugggcgaggagcguaacuaa

SEQ ID NO: 6311 - RNA, 32 nt, Artificial Sequence
  Synthetic
caccagcucccugggcgaggagcguaacuaag

SEQ ID NO: 6312 - RNA, 32 nt, Artificial Sequence
  Synthetic
accagcucccugggcgaggagcguaacuaagu

SEQ ID NO: 6313 - RNA, 32 nt, Artificial Sequence
  Synthetic
ccagcucccugggcgaggagcguaacuaaguc

SEQ ID NO: 6314 - RNA, 32 nt, Artificial Sequence
  Synthetic
cagcucccugggcgaggagcguaacuaagucc

SEQ ID NO: 6315 - RNA, 32 nt, Artificial Sequence
  Synthetic
agcucccugggcgaggagcguaacuaaguccg

SEQ ID NO: 6316 - RNA, 32 nt, Artificial Sequence
  Synthetic
gcucccugggcgaggagcguaacuaaguccgc

SEQ ID NO: 6317 - RNA, 32 nt, Artificial Sequence
  Synthetic
cucccugggcgaggagcguaacuaaguccgcc

SEQ ID NO: 6318 - RNA, 32 nt, Artificial Sequence
  Synthetic
ucccugggcgaggagcguaacuaaguccgccc

SEQ ID NO: 6319 - RNA, 32 nt, Artificial Sequence
  Synthetic
cccugggcgaggagcguaacuaaguccgcccc

SEQ ID NO: 6320 - RNA, 32 nt, Artificial Sequence
  Synthetic
ccugggcgaggagcguaacuaaguccgcccca

SEQ ID NO: 6321 - RNA, 32 nt, Artificial Sequence
  Synthetic
cugggcgaggagcguaacuaaguccgccccac

SEQ ID NO: 6322 - RNA, 32 nt, Artificial Sequence
  Synthetic
ugggcgaggagcguaacuaaguccgccccacc

SEQ ID NO: 6323 - RNA, 32 nt, Artificial Sequence
  Synthetic
gggcgaggagcguaacuaaguccgccccacca

SEQ ID NO: 6324 - RNA, 32 nt, Artificial Sequence
  Synthetic
ggcgaggagcguaacuaaguccgccccaccac

SEQ ID NO: 6325 - RNA, 32 nt, Artificial Sequence
  Synthetic
gcgaggagcguaacuaaguccgccccaccaca

SEQ ID NO: 6326 - RNA, 32 nt, Artificial Sequence
  Synthetic
cgaggagcguaacuaaguccgccccaccacac

SEQ ID NO: 6327 - RNA, 32 nt, Artificial Sequence
  Synthetic
gaggagcguaacuaaguccgccccaccacacu

SEQ ID NO: 6328 - RNA, 32 nt, Artificial Sequence
  Synthetic
aggagcguaacuaaguccgccccaccacacuc

SEQ ID NO: 6329 - RNA, 32 nt, Artificial Sequence
  Synthetic
ggagcguaacuaaguccgccccaccacacucc

SEQ ID NO: 6330 - RNA, 32 nt, Artificial Sequence
  Synthetic
gagcguaacuaaguccgccccaccacacuccc

SEQ ID NO: 6331 - RNA, 32 nt, Artificial Sequence
  Synthetic
agcguaacuaaguccgccccaccacacucccc

SEQ ID NO: 6332 - RNA, 32 nt, Artificial Sequence
  Synthetic
gcguaacuaaguccgccccaccacacuccccg

SEQ ID NO: 6333 - RNA, 32 nt, Artificial Sequence
  Synthetic
cguaacuaaguccgccccaccacacuccccgc

SEQ ID NO: 6334 - RNA, 32 nt, Artificial Sequence
  Synthetic
guaacuaaguccgccccaccacacuccccgcc

SEQ ID NO: 6335 - RNA, 32 nt, Artificial Sequence
  Synthetic
uaacuaaguccgccccaccacacuccccgccu

SEQ ID NO: 6336 - RNA, 32 nt, Artificial Sequence
  Synthetic
aacuaaguccgccccaccacacuccccgccug

SEQ ID NO: 6337 - RNA, 32 nt, Artificial Sequence
  Synthetic
acuaaguccgccccaccacacuccccgccugu

SEQ ID NO: 6338 - RNA, 32 nt, Artificial Sequence
  Synthetic
cuaaguccgccccaccacacuccccgccuguc

SEQ ID NO: 6339 - RNA, 32 nt, Artificial Sequence
  Synthetic
uaaguccgccccaccacacuccccgccugucc

SEQ ID NO: 6340 - RNA, 32 nt, Artificial Sequence
  Synthetic
aaguccgccccaccacacuccccgccuguccu

SEQ ID NO: 6341 - RNA, 32 nt, Artificial Sequence
  Synthetic
aguccgccccaccacacuccccgccuguccug

SEQ ID NO: 6342 - RNA, 32 nt, Artificial Sequence
  Synthetic
guccgccccaccacacuccccgccuguccugc

SEQ ID NO: 6343 - RNA, 32 nt, Artificial Sequence
  Synthetic
uccgccccaccacacuccccgccuguccugcc

SEQ ID NO: 6344 - RNA, 32 nt, Artificial Sequence
  Synthetic
ccgccccaccacacuccccgccuguccugccu

SEQ ID NO: 6345 - RNA, 32 nt, Artificial Sequence
  Synthetic
cgccccaccacacuccccgccuguccugccuc

SEQ ID NO: 6346 - RNA, 32 nt, Artificial Sequence
  Synthetic
gccccaccacacuccccgccuguccugccucu

SEQ ID NO: 6347 - RNA, 32 nt, Artificial Sequence
  Synthetic
ccccaccacacuccccgccuguccugccucuc

SEQ ID NO: 6348 - RNA, 32 nt, Artificial Sequence
  Synthetic
cccaccacacuccccgccuguccugccucucu

SEQ ID NO: 6349 - RNA, 32 nt, Artificial Sequence
  Synthetic
ccaccacacuccccgccuguccugccucucug

SEQ ID NO: 6350 - RNA, 32 nt, Artificial Sequence
  Synthetic
caccacacuccccgccuguccugccucucugc

SEQ ID NO: 6351 - RNA, 32 nt, Artificial Sequence
  Synthetic
accacacuccccgccuguccugccucucugcu

SEQ ID NO: 6352 - RNA, 32 nt, Artificial Sequence
  Synthetic
ccacacuccccgccuguccugccucucugcuc

SEQ ID NO: 6353 - RNA, 32 nt, Artificial Sequence
  Synthetic
cacacuccccgccuguccugccucucugcucc

SEQ ID NO: 6354 - RNA, 32 nt, Artificial Sequence
  Synthetic
acacuccccgccuguccugccucucugcucca

SEQ ID NO: 6355 - RNA, 32 nt, Artificial Sequence
  Synthetic
cacuccccgccuguccugccucucugcuccag

SEQ ID NO: 6356 - RNA, 32 nt, Artificial Sequence
  Synthetic
acuccccgccuguccugccucucugcuccaga

SEQ ID NO: 6357 - RNA, 32 nt, Artificial Sequence
  Synthetic
cuccccgccuguccugccucucugcuccagag

SEQ ID NO: 6358 - RNA, 32 nt, Artificial Sequence
  Synthetic
uccccgccuguccugccucucugcuccagaga

SEQ ID NO: 6359 - RNA, 32 nt, Artificial Sequence
  Synthetic
ccccgccuguccugccucucugcuccagagag

SEQ ID NO: 6360 - RNA, 32 nt, Artificial Sequence
  Synthetic
cccgccuguccugccucucugcuccagagaga

SEQ ID NO: 6361 - RNA, 32 nt, Artificial Sequence
  Synthetic
ccgccuguccugccucucugcuccagagagag

SEQ ID NO: 6362 - RNA, 32 nt, Artificial Sequence
  Synthetic
cgccuguccugccucucugcuccagagagagg

SEQ ID NO: 6363 - RNA, 32 nt, Artificial Sequence
  Synthetic
gccuguccugccucucugcuccagagagagga

SEQ ID NO: 6364 - RNA, 32 nt, Artificial Sequence
  Synthetic
ccuguccugccucucugcuccagagagaggau

SEQ ID NO: 6365 - RNA, 32 nt, Artificial Sequence
  Synthetic
cuguccugccucucugcuccagagagaggaug

SEQ ID NO: 6366 - RNA, 32 nt, Artificial Sequence
  Synthetic
uguccugccucucugcuccagagagaggaugc

SEQ ID NO: 6367 - RNA, 32 nt, Artificial Sequence
  Synthetic
guccugccucucugcuccagagagaggaugca

SEQ ID NO: 6368 - RNA, 32 nt, Artificial Sequence
  Synthetic
uccugccucucugcuccagagagaggaugcag

SEQ ID NO: 6369 - RNA, 32 nt, Artificial Sequence
  Synthetic
ccugccucucugcuccagagagaggaugcaga

SEQ ID NO: 6370 - RNA, 32 nt, Artificial Sequence
  Synthetic
cugccucucugcuccagagagaggaugcagag

SEQ ID NO: 6371 - RNA, 32 nt, Artificial Sequence
  Synthetic
ugccucucugcuccagagagaggaugcagagg

SEQ ID NO: 6372 - RNA, 32 nt, Artificial Sequence
  Synthetic
gccucucugcuccagagagaggaugcagaggg

SEQ ID NO: 6373 - RNA, 32 nt, Artificial Sequence
  Synthetic
ccucucugcuccagagagaggaugcagagggg

SEQ ID NO: 6374 - RNA, 32 nt, Artificial Sequence
  Synthetic
cucucugcuccagagagaggaugcagaggggu

SEQ ID NO: 6375 - RNA, 32 nt, Artificial Sequence
  Synthetic
ucucugcuccagagagaggaugcagaggggug

SEQ ID NO: 6376 - RNA, 32 nt, Artificial Sequence
  Synthetic
cucugcuccagagagaggaugcagaggggugc

SEQ ID NO: 6377 - RNA, 32 nt, Artificial Sequence
  Synthetic
ucugcuccagagagaggaugcagaggggugcu

SEQ ID NO: 6378 - RNA, 32 nt, Artificial Sequence
  Synthetic
cugcuccagagagaggaugcagaggggugcug

SEQ ID NO: 6379 - RNA, 32 nt, Artificial Sequence
  Synthetic
ugcuccagagagaggaugcagaggggugcugc

SEQ ID NO: 6380 - RNA, 32 nt, Artificial Sequence
  Synthetic
gcuccagagagaggaugcagaggggugcugcu

SEQ ID NO: 6381 - RNA, 32 nt, Artificial Sequence
  Synthetic
cuccagagagaggaugcagaggggugcugcuc

SEQ ID NO: 6382 - RNA, 32 nt, Artificial Sequence
  Synthetic
uccagagagaggaugcagaggggugcugcucc

SEQ ID NO: 6383 - RNA, 32 nt, Artificial Sequence
  Synthetic
ccagagagaggaugcagaggggugcugcuccu

SEQ ID NO: 6384 - RNA, 32 nt, Artificial Sequence
  Synthetic
cagagagaggaugcagaggggugcugcuccua

SEQ ID NO: 6385 - RNA, 32 nt, Artificial Sequence
  Synthetic
agagagaggaugcagaggggugcugcuccuaa

SEQ ID NO: 6386 - RNA, 32 nt, Artificial Sequence
  Synthetic
gagagaggaugcagaggggugcugcuccuaaa

SEQ ID NO: 6387 - RNA, 32 nt, Artificial Sequence
  Synthetic
agagaggaugcagaggggugcugcuccuaaac

SEQ ID NO: 6388 - RNA, 32 nt, Artificial Sequence
  Synthetic
gagaggaugcagaggggugcugcuccuaaacc

SEQ ID NO: 6389 - RNA, 32 nt, Artificial Sequence
  Synthetic
agaggaugcagaggggugcugcuccuaaaccc

SEQ ID NO: 6390 - RNA, 32 nt, Artificial Sequence
  Synthetic
gaggaugcagaggggugcugcuccuaaacccc

SEQ ID NO: 6391 - RNA, 32 nt, Artificial Sequence
  Synthetic
aggaugcagaggggugcugcuccuaaaccccc

SEQ ID NO: 6392 - RNA, 32 nt, Artificial Sequence
  Synthetic
ggaugcagaggggugcugcuccuaaacccccg

SEQ ID NO: 6393 - RNA, 32 nt, Artificial Sequence
  Synthetic
gaugcagaggggugcugcuccuaaacccccgc

SEQ ID NO: 6394 - RNA, 32 nt, Artificial Sequence
  Synthetic
augcagaggggugcugcuccuaaacccccgcu

SEQ ID NO: 6395 - RNA, 32 nt, Artificial Sequence
  Synthetic
ugcagaggggugcugcuccuaaacccccgcuc

SEQ ID NO: 6396 - RNA, 32 nt, Artificial Sequence
  Synthetic
gcagaggggugcugcuccuaaacccccgcucc

SEQ ID NO: 6397 - RNA, 32 nt, Artificial Sequence
  Synthetic
cagaggggugcugcuccuaaacccccgcucca

SEQ ID NO: 6398 - RNA, 32 nt, Artificial Sequence
  Synthetic
agaggggugcugcuccuaaacccccgcuccag

SEQ ID NO: 6399 - RNA, 32 nt, Artificial Sequence
  Synthetic
gaggggugcugcuccuaaacccccgcuccaga

SEQ ID NO: 6400 - RNA, 32 nt, Artificial Sequence
  Synthetic
aggggugcugcuccuaaacccccgcuccagau

SEQ ID NO: 6401 - RNA, 32 nt, Artificial Sequence
  Synthetic
ggggugcugcuccuaaacccccgcuccagauc

SEQ ID NO: 6402 - RNA, 32 nt, Artificial Sequence
  Synthetic
gggugcugcuccuaaacccccgcuccagaucu

SEQ ID NO: 6403 - RNA, 32 nt, Artificial Sequence
  Synthetic
ggugcugcuccuaaacccccgcuccagaucug

SEQ ID NO: 6404 - RNA, 32 nt, Artificial Sequence
  Synthetic
gugcugcuccuaaacccccgcuccagaucugc

SEQ ID NO: 6405 - RNA, 32 nt, Artificial Sequence
  Synthetic
ugcugcuccuaaacccccgcuccagaucugca

SEQ ID NO: 6406 - RNA, 32 nt, Artificial Sequence
  Synthetic
gcugcuccuaaacccccgcuccagaucugcac

SEQ ID NO: 6407 - RNA, 32 nt, Artificial Sequence
  Synthetic
cugcuccuaaacccccgcuccagaucugcacu

SEQ ID NO: 6408 - RNA, 32 nt, Artificial Sequence
  Synthetic
ugcuccuaaacccccgcuccagaucugcacug

SEQ ID NO: 6409 - RNA, 32 nt, Artificial Sequence
  Synthetic
gcuccuaaacccccgcuccagaucugcacugg

SEQ ID NO: 6410 - RNA, 32 nt, Artificial Sequence
  Synthetic
cuccuaaacccccgcuccagaucugcacuggg

SEQ ID NO: 6411 - RNA, 32 nt, Artificial Sequence
  Synthetic
uccuaaacccccgcuccagaucugcacugggu

SEQ ID NO: 6412 - RNA, 32 nt, Artificial Sequence
  Synthetic
ccuaaacccccgcuccagaucugcacugggug

SEQ ID NO: 6413 - RNA, 32 nt, Artificial Sequence
  Synthetic
cuaaacccccgcuccagaucugcacugggugu

SEQ ID NO: 6414 - RNA, 32 nt, Artificial Sequence
  Synthetic
uaaacccccgcuccagaucugcacugggugug

SEQ ID NO: 6415 - RNA, 32 nt, Artificial Sequence
  Synthetic
aaacccccgcuccagaucugcacugggugugg

SEQ ID NO: 6416 - RNA, 32 nt, Artificial Sequence
  Synthetic
aacccccgcuccagaucugcacuggguguggc

SEQ ID NO: 6417 - RNA, 32 nt, Artificial Sequence
  Synthetic
acccccgcuccagaucugcacuggguguggcc

SEQ ID NO: 6418 - RNA, 32 nt, Artificial Sequence
  Synthetic
cccccgcuccagaucugcacuggguguggccc

SEQ ID NO: 6419 - RNA, 32 nt, Artificial Sequence
  Synthetic
ccccgcuccagaucugcacuggguguggcccc

SEQ ID NO: 6420 - RNA, 32 nt, Artificial Sequence
  Synthetic
cccgcuccagaucugcacuggguguggccccg

SEQ ID NO: 6421 - RNA, 32 nt, Artificial Sequence
  Synthetic
ccgcuccagaucugcacuggguguggccccgc

SEQ ID NO: 6422 - RNA, 32 nt, Artificial Sequence
  Synthetic
cgcuccagaucugcacuggguguggccccgca

SEQ ID NO: 6423 - RNA, 32 nt, Artificial Sequence
  Synthetic
gcuccagaucugcacuggguguggccccgcag

SEQ ID NO: 6424 - RNA, 32 nt, Artificial Sequence
  Synthetic
cuccagaucugcacuggguguggccccgcagu

SEQ ID NO: 6425 - RNA, 32 nt, Artificial Sequence
  Synthetic
uccagaucugcacuggguguggccccgcagug

SEQ ID NO: 6426 - RNA, 32 nt, Artificial Sequence
  Synthetic
ccagaucugcacuggguguggccccgcagugc

SEQ ID NO: 6427 - RNA, 32 nt, Artificial Sequence
  Synthetic
cagaucugcacuggguguggccccgcagugcc

SEQ ID NO: 6428 - RNA, 32 nt, Artificial Sequence
  Synthetic
agaucugcacuggguguggccccgcagugccc

SEQ ID NO: 6429 - RNA, 32 nt, Artificial Sequence
  Synthetic
gaucugcacuggguguggccccgcagugcccc

SEQ ID NO: 6430 - RNA, 32 nt, Artificial Sequence
  Synthetic
aucugcacuggguguggccccgcagugccccc

SEQ ID NO: 6431 - RNA, 32 nt, Artificial Sequence
  Synthetic
ucugcacuggguguggccccgcagugccccca

SEQ ID NO: 6432 - RNA, 32 nt, Artificial Sequence
  Synthetic
cugcacuggguguggccccgcagugcccccac

SEQ ID NO: 6433 - RNA, 32 nt, Artificial Sequence
  Synthetic
ugcacuggguguggccccgcagugcccccacc

SEQ ID NO: 6434 - RNA, 32 nt, Artificial Sequence
  Synthetic
gcacuggguguggccccgcagugcccccaccc

SEQ ID NO: 6435 - RNA, 32 nt, Artificial Sequence
  Synthetic
cacuggguguggccccgcagugcccccaccca

SEQ ID NO: 6436 - RNA, 32 nt, Artificial Sequence
  Synthetic
acuggguguggccccgcagugcccccacccag

SEQ ID NO: 6437 - RNA, 32 nt, Artificial Sequence
  Synthetic
cuggguguggccccgcagugcccccacccagu

SEQ ID NO: 6438 - RNA, 32 nt, Artificial Sequence
  Synthetic
uggguguggccccgcagugcccccacccaguc

SEQ ID NO: 6439 - RNA, 32 nt, Artificial Sequence
  Synthetic
ggguguggccccgcagugcccccacccagucc

SEQ ID NO: 6440 - RNA, 32 nt, Artificial Sequence
  Synthetic
gguguggccccgcagugcccccacccaguccg

SEQ ID NO: 6441 - RNA, 32 nt, Artificial Sequence
  Synthetic
guguggccccgcagugcccccacccaguccgc

SEQ ID NO: 6442 - RNA, 32 nt, Artificial Sequence
  Synthetic
uguggccccgcagugcccccacccaguccgcc

SEQ ID NO: 6443 - RNA, 32 nt, Artificial Sequence
  Synthetic
guggccccgcagugcccccacccaguccgcca

SEQ ID NO: 6444 - RNA, 32 nt, Artificial Sequence
  Synthetic
uggccccgcagugcccccacccaguccgccaa

SEQ ID NO: 6445 - RNA, 32 nt, Artificial Sequence
  Synthetic
ggccccgcagugcccccacccaguccgccaaa

SEQ ID NO: 6446 - RNA, 32 nt, Artificial Sequence
  Synthetic
gccccgcagugcccccacccaguccgccaaac

SEQ ID NO: 6447 - RNA, 32 nt, Artificial Sequence
  Synthetic
ccccgcagugcccccacccaguccgccaaaca

SEQ ID NO: 6448 - RNA, 32 nt, Artificial Sequence
  Synthetic
cccgcagugcccccacccaguccgccaaacac

SEQ ID NO: 6449 - RNA, 32 nt, Artificial Sequence
  Synthetic
ccgcagugcccccacccaguccgccaaacacu

SEQ ID NO: 6450 - RNA, 32 nt, Artificial Sequence
  Synthetic
cgcagugcccccacccaguccgccaaacacuc

SEQ ID NO: 6451 - RNA, 32 nt, Artificial Sequence
  Synthetic
gcagugcccccacccaguccgccaaacacucc

SEQ ID NO: 6452 - RNA, 32 nt, Artificial Sequence
  Synthetic
cagugcccccacccaguccgccaaacacucca

SEQ ID NO: 6453 - RNA, 32 nt, Artificial Sequence
  Synthetic
agugcccccacccaguccgccaaacacuccac

SEQ ID NO: 6454 - RNA, 32 nt, Artificial Sequence
  Synthetic
gugcccccacccaguccgccaaacacuccacc

SEQ ID NO: 6455 - RNA, 32 nt, Artificial Sequence
  Synthetic
ugcccccacccaguccgccaaacacuccaccc

SEQ ID NO: 6456 - RNA, 32 nt, Artificial Sequence
  Synthetic
gcccccacccaguccgccaaacacuccacccc

SEQ ID NO: 6457 - RNA, 32 nt, Artificial Sequence
  Synthetic
cccccacccaguccgccaaacacuccaccccc

SEQ ID NO: 6458 - RNA, 32 nt, Artificial Sequence
  Synthetic
ccccacccaguccgccaaacacuccacccccu

SEQ ID NO: 6459 - RNA, 32 nt, Artificial Sequence
  Synthetic
cccacccaguccgccaaacacuccacccccuc

SEQ ID NO: 6460 - RNA, 32 nt, Artificial Sequence
  Synthetic
ccacccaguccgccaaacacuccacccccucc

SEQ ID NO: 6461 - RNA, 32 nt, Artificial Sequence
  Synthetic
cacccaguccgccaaacacuccacccccucca

SEQ ID NO: 6462 - RNA, 32 nt, Artificial Sequence
  Synthetic
acccaguccgccaaacacuccacccccuccag

SEQ ID NO: 6463 - RNA, 32 nt, Artificial Sequence
  Synthetic
cccaguccgccaaacacuccacccccuccagc

SEQ ID NO: 6464 - RNA, 32 nt, Artificial Sequence
  Synthetic
ccaguccgccaaacacuccacccccuccagcu

SEQ ID NO: 6465 - RNA, 32 nt, Artificial Sequence
  Synthetic
caguccgccaaacacuccacccccuccagcuc

SEQ ID NO: 6466 - RNA, 32 nt, Artificial Sequence
  Synthetic
aguccgccaaacacuccacccccuccagcucc

SEQ ID NO: 6467 - RNA, 32 nt, Artificial Sequence
  Synthetic
guccgccaaacacuccacccccuccagcucca

SEQ ID NO: 6468 - RNA, 32 nt, Artificial Sequence
  Synthetic
uccgccaaacacuccacccccuccagcuccag

SEQ ID NO: 6469 - RNA, 32 nt, Artificial Sequence
  Synthetic
ccgccaaacacuccacccccuccagcuccagu

SEQ ID NO: 6470 - RNA, 32 nt, Artificial Sequence
  Synthetic
cgccaaacacuccacccccuccagcuccaguu

SEQ ID NO: 6471 - RNA, 32 nt, Artificial Sequence
  Synthetic
gccaaacacuccacccccuccagcuccaguuu

SEQ ID NO: 6472 - RNA, 32 nt, Artificial Sequence
  Synthetic
ccaaacacuccacccccuccagcuccaguuuc

SEQ ID NO: 6473 - RNA, 32 nt, Artificial Sequence
  Synthetic
caaacacuccacccccuccagcuccaguuucc

SEQ ID NO: 6474 - RNA, 32 nt, Artificial Sequence
  Synthetic
aaacacuccacccccuccagcuccaguuucca

SEQ ID NO: 6475 - RNA, 32 nt, Artificial Sequence
  Synthetic
aacacuccacccccuccagcuccaguuuccaa

SEQ ID NO: 6476 - RNA, 32 nt, Artificial Sequence
  Synthetic
acacuccacccccuccagcuccaguuuccaag

SEQ ID NO: 6477 - RNA, 32 nt, Artificial Sequence
  Synthetic
cacuccacccccuccagcuccaguuuccaagu

SEQ ID NO: 6478 - RNA, 32 nt, Artificial Sequence
  Synthetic
acuccacccccuccagcuccaguuuccaaguu

SEQ ID NO: 6479 - RNA, 32 nt, Artificial Sequence
  Synthetic
cuccacccccuccagcuccaguuuccaaguuc

SEQ ID NO: 6480 - RNA, 32 nt, Artificial Sequence
  Synthetic
uccacccccuccagcuccaguuuccaaguucc

SEQ ID NO: 6481 - RNA, 32 nt, Artificial Sequence
  Synthetic
ccacccccuccagcuccaguuuccaaguuccu

SEQ ID NO: 6482 - RNA, 32 nt, Artificial Sequence
  Synthetic
cacccccuccagcuccaguuuccaaguuccug

SEQ ID NO: 6483 - RNA, 32 nt, Artificial Sequence
  Synthetic
acccccuccagcuccaguuuccaaguuccugc

SEQ ID NO: 6484 - RNA, 32 nt, Artificial Sequence
  Synthetic
cccccuccagcuccaguuuccaaguuccugca

SEQ ID NO: 6485 - RNA, 32 nt, Artificial Sequence
  Synthetic
ccccuccagcuccaguuuccaaguuccugcac

SEQ ID NO: 6486 - RNA, 32 nt, Artificial Sequence
  Synthetic
cccuccagcuccaguuuccaaguuccugcacu

SEQ ID NO: 6487 - RNA, 32 nt, Artificial Sequence
  Synthetic
ccuccagcuccaguuuccaaguuccugcacuc

SEQ ID NO: 6488 - RNA, 32 nt, Artificial Sequence
  Synthetic
cuccagcuccaguuuccaaguuccugcacucc

SEQ ID NO: 6489 - RNA, 32 nt, Artificial Sequence
  Synthetic
uccagcuccaguuuccaaguuccugcacucca

SEQ ID NO: 6490 - RNA, 32 nt, Artificial Sequence
  Synthetic
ccagcuccaguuuccaaguuccugcacuccag

SEQ ID NO: 6491 - RNA, 32 nt, Artificial Sequence
  Synthetic
cagcuccaguuuccaaguuccugcacuccaga

SEQ ID NO: 6492 - RNA, 32 nt, Artificial Sequence
  Synthetic
agcuccaguuuccaaguuccugcacuccagaa

SEQ ID NO: 6493 - RNA, 32 nt, Artificial Sequence
  Synthetic
gcuccaguuuccaaguuccugcacuccagaau

SEQ ID NO: 6494 - RNA, 32 nt, Artificial Sequence
  Synthetic
cuccaguuuccaaguuccugcacuccagaauc

SEQ ID NO: 6495 - RNA, 32 nt, Artificial Sequence
  Synthetic
uccaguuuccaaguuccugcacuccagaaucc

SEQ ID NO: 6496 - RNA, 32 nt, Artificial Sequence
  Synthetic
ccaguuuccaaguuccugcacuccagaaucca

SEQ ID NO: 6497 - RNA, 32 nt, Artificial Sequence
  Synthetic
caguuuccaaguuccugcacuccagaauccac

SEQ ID NO: 6498 - RNA, 32 nt, Artificial Sequence
  Synthetic
aguuuccaaguuccugcacuccagaauccaca

SEQ ID NO: 6499 - RNA, 32 nt, Artificial Sequence
  Synthetic
guuuccaaguuccugcacuccagaauccacaa

SEQ ID NO: 6500 - RNA, 32 nt, Artificial Sequence
  Synthetic
uuuccaaguuccugcacuccagaauccacaaa

SEQ ID NO: 6501 - RNA, 32 nt, Artificial Sequence
  Synthetic
uuccaaguuccugcacuccagaauccacaaag

SEQ ID NO: 6502 - RNA, 32 nt, Artificial Sequence
  Synthetic
uccaaguuccugcacuccagaauccacaaagc

SEQ ID NO: 6503 - RNA, 32 nt, Artificial Sequence
  Synthetic
ccaaguuccugcacuccagaauccacaaagcc

SEQ ID NO: 6504 - RNA, 32 nt, Artificial Sequence
  Synthetic
caaguuccugcacuccagaauccacaaagccg

SEQ ID NO: 6505 - RNA, 32 nt, Artificial Sequence
  Synthetic
aaguuccugcacuccagaauccacaaagccgu

SEQ ID NO: 6506 - RNA, 32 nt, Artificial Sequence
  Synthetic
aguuccugcacuccagaauccacaaagccgug

SEQ ID NO: 6507 - RNA, 32 nt, Artificial Sequence
  Synthetic
guuccugcacuccagaauccacaaagccgugc

SEQ ID NO: 6508 - RNA, 32 nt, Artificial Sequence
  Synthetic
uuccugcacuccagaauccacaaagccgugcc

SEQ ID NO: 6509 - RNA, 32 nt, Artificial Sequence
  Synthetic
uccugcacuccagaauccacaaagccgugccu

SEQ ID NO: 6510 - RNA, 32 nt, Artificial Sequence
  Synthetic
ccugcacuccagaauccacaaagccgugccuu

SEQ ID NO: 6511 - RNA, 32 nt, Artificial Sequence
  Synthetic
cugcacuccagaauccacaaagccgugccuuu

SEQ ID NO: 6512 - RNA, 32 nt, Artificial Sequence
  Synthetic
ugcacuccagaauccacaaagccgugccuuuc

SEQ ID NO: 6513 - RNA, 32 nt, Artificial Sequence
  Synthetic
gcacuccagaauccacaaagccgugccuuucu

SEQ ID NO: 6514 - RNA, 32 nt, Artificial Sequence
  Synthetic
cacuccagaauccacaaagccgugccuuucuc

SEQ ID NO: 6515 - RNA, 32 nt, Artificial Sequence
  Synthetic
acuccagaauccacaaagccgugccuuucucu

SEQ ID NO: 6516 - RNA, 32 nt, Artificial Sequence
  Synthetic
cuccagaauccacaaagccgugccuuucucug

SEQ ID NO: 6517 - RNA, 32 nt, Artificial Sequence
  Synthetic
uccagaauccacaaagccgugccuuucucugg

SEQ ID NO: 6518 - RNA, 32 nt, Artificial Sequence
  Synthetic
ccagaauccacaaagccgugccuuucucuggc

SEQ ID NO: 6519 - RNA, 32 nt, Artificial Sequence
  Synthetic
cagaauccacaaagccgugccuuucucuggcu

SEQ ID NO: 6520 - RNA, 32 nt, Artificial Sequence
  Synthetic
agaauccacaaagccgugccuuucucuggcuc

SEQ ID NO: 6521 - RNA, 32 nt, Artificial Sequence
  Synthetic
gaauccacaaagccgugccuuucucuggcucc

SEQ ID NO: 6522 - RNA, 32 nt, Artificial Sequence
  Synthetic
aauccacaaagccgugccuuucucuggcucca

SEQ ID NO: 6523 - RNA, 32 nt, Artificial Sequence
  Synthetic
auccacaaagccgugccuuucucuggcuccag

SEQ ID NO: 6524 - RNA, 32 nt, Artificial Sequence
  Synthetic
uccacaaagccgugccuuucucuggcuccaga

SEQ ID NO: 6525 - RNA, 32 nt, Artificial Sequence
  Synthetic
ccacaaagccgugccuuucucuggcuccagaa

SEQ ID NO: 6526 - RNA, 32 nt, Artificial Sequence
  Synthetic
cacaaagccgugccuuucucuggcuccagaau

SEQ ID NO: 6527 - RNA, 32 nt, Artificial Sequence
  Synthetic
acaaagccgugccuuucucuggcuccagaaua

SEQ ID NO: 6528 - RNA, 32 nt, Artificial Sequence
  Synthetic
caaagccgugccuuucucuggcuccagaauau

SEQ ID NO: 6529 - RNA, 32 nt, Artificial Sequence
  Synthetic
aaagccgugccuuucucuggcuccagaauaug

SEQ ID NO: 6530 - RNA, 32 nt, Artificial Sequence
  Synthetic
aagccgugccuuucucuggcuccagaauaugc

SEQ ID NO: 6531 - RNA, 32 nt, Artificial Sequence
  Synthetic
agccgugccuuucucuggcuccagaauaugca

SEQ ID NO: 6532 - RNA, 32 nt, Artificial Sequence
  Synthetic
gccgugccuuucucuggcuccagaauaugcau

SEQ ID NO: 6533 - RNA, 32 nt, Artificial Sequence
  Synthetic
ccgugccuuucucuggcuccagaauaugcaua

SEQ ID NO: 6534 - RNA, 32 nt, Artificial Sequence
  Synthetic
cgugccuuucucuggcuccagaauaugcauaa

SEQ ID NO: 6535 - RNA, 32 nt, Artificial Sequence
  Synthetic
gugccuuucucuggcuccagaauaugcauaau

SEQ ID NO: 6536 - RNA, 32 nt, Artificial Sequence
  Synthetic
ugccuuucucuggcuccagaauaugcauaauc

SEQ ID NO: 6537 - RNA, 32 nt, Artificial Sequence
  Synthetic
gccuuucucuggcuccagaauaugcauaauca

SEQ ID NO: 6538 - RNA, 32 nt, Artificial Sequence
  Synthetic
ccuuucucuggcuccagaauaugcauaaucag

SEQ ID NO: 6539 - RNA, 32 nt, Artificial Sequence
  Synthetic
cuuucucuggcuccagaauaugcauaaucagc

SEQ ID NO: 6540 - RNA, 32 nt, Artificial Sequence
  Synthetic
uuucucuggcuccagaauaugcauaaucagcg

SEQ ID NO: 6541 - RNA, 32 nt, Artificial Sequence
  Synthetic
uucucuggcuccagaauaugcauaaucagcgc

SEQ ID NO: 6542 - RNA, 32 nt, Artificial Sequence
  Synthetic
ucucuggcuccagaauaugcauaaucagcgcc

SEQ ID NO: 6543 - RNA, 32 nt, Artificial Sequence
  Synthetic
cucuggcuccagaauaugcauaaucagcgccc

SEQ ID NO: 6544 - RNA, 32 nt, Artificial Sequence
  Synthetic
ucuggcuccagaauaugcauaaucagcgcccu

SEQ ID NO: 6545 - RNA, 32 nt, Artificial Sequence
  Synthetic
cuggcuccagaauaugcauaaucagcgcccug

SEQ ID NO: 6546 - RNA, 32 nt, Artificial Sequence
  Synthetic
uggcuccagaauaugcauaaucagcgcccugg

SEQ ID NO: 6547 - RNA, 32 nt, Artificial Sequence
  Synthetic
ggcuccagaauaugcauaaucagcgcccugga

SEQ ID NO: 6548 - RNA, 32 nt, Artificial Sequence
  Synthetic
gcuccagaauaugcauaaucagcgcccuggag

SEQ ID NO: 6549 - RNA, 32 nt, Artificial Sequence
  Synthetic
cuccagaauaugcauaaucagcgcccuggagu

SEQ ID NO: 6550 - RNA, 32 nt, Artificial Sequence
  Synthetic
uccagaauaugcauaaucagcgcccuggaguc

SEQ ID NO: 6551 - RNA, 32 nt, Artificial Sequence
  Synthetic
ccagaauaugcauaaucagcgcccuggagucc

SEQ ID NO: 6552 - RNA, 32 nt, Artificial Sequence
  Synthetic
cagaauaugcauaaucagcgcccuggaguccc

SEQ ID NO: 6553 - RNA, 32 nt, Artificial Sequence
  Synthetic
agaauaugcauaaucagcgcccuggagucccc

SEQ ID NO: 6554 - RNA, 32 nt, Artificial Sequence
  Synthetic
gaauaugcauaaucagcgcccuggaguccccu

SEQ ID NO: 6555 - RNA, 32 nt, Artificial Sequence
  Synthetic
aauaugcauaaucagcgcccuggaguccccug

SEQ ID NO: 6556 - RNA, 32 nt, Artificial Sequence
  Synthetic
auaugcauaaucagcgcccuggaguccccugg

SEQ ID NO: 6557 - RNA, 32 nt, Artificial Sequence
  Synthetic
uaugcauaaucagcgcccuggaguccccuggg

SEQ ID NO: 6558 - RNA, 32 nt, Artificial Sequence
  Synthetic
augcauaaucagcgcccuggaguccccugggc

SEQ ID NO: 6559 - RNA, 32 nt, Artificial Sequence
  Synthetic
ugcauaaucagcgcccuggaguccccugggcc

SEQ ID NO: 6560 - RNA, 32 nt, Artificial Sequence
  Synthetic
gcauaaucagcgcccuggaguccccugggccu

SEQ ID NO: 6561 - RNA, 32 nt, Artificial Sequence
  Synthetic
cauaaucagcgcccuggaguccccugggccug

SEQ ID NO: 6562 - RNA, 32 nt, Artificial Sequence
  Synthetic
auaaucagcgcccuggaguccccugggccugg

SEQ ID NO: 6563 - RNA, 32 nt, Artificial Sequence
  Synthetic
uaaucagcgcccuggaguccccugggccugga

SEQ ID NO: 6564 - RNA, 32 nt, Artificial Sequence
  Synthetic
aaucagcgcccuggaguccccugggccuggac

SEQ ID NO: 6565 - RNA, 32 nt, Artificial Sequence
  Synthetic
aucagcgcccuggaguccccugggccuggacc

SEQ ID NO: 6566 - RNA, 32 nt, Artificial Sequence
  Synthetic
ucagcgcccuggaguccccugggccuggaccg

SEQ ID NO: 6567 - RNA, 32 nt, Artificial Sequence
  Synthetic
cagcgcccuggaguccccugggccuggaccgc

SEQ ID NO: 6568 - RNA, 32 nt, Artificial Sequence
  Synthetic
agcgcccuggaguccccugggccuggaccgcu

SEQ ID NO: 6569 - RNA, 32 nt, Artificial Sequence
  Synthetic
gcgcccuggaguccccugggccuggaccgcuu

SEQ ID NO: 6570 - RNA, 32 nt, Artificial Sequence
  Synthetic
cgcccuggaguccccugggccuggaccgcuuc

SEQ ID NO: 6571 - RNA, 32 nt, Artificial Sequence
  Synthetic
gcccuggaguccccugggccuggaccgcuucc

SEQ ID NO: 6572 - RNA, 32 nt, Artificial Sequence
  Synthetic
cccuggaguccccugggccuggaccgcuuccc

SEQ ID NO: 6573 - RNA, 32 nt, Artificial Sequence
  Synthetic
ccuggaguccccugggccuggaccgcuuccca

SEQ ID NO: 6574 - RNA, 32 nt, Artificial Sequence
  Synthetic
cuggaguccccugggccuggaccgcuucccag

SEQ ID NO: 6575 - RNA, 32 nt, Artificial Sequence
  Synthetic
uggaguccccugggccuggaccgcuucccaga

SEQ ID NO: 6576 - RNA, 32 nt, Artificial Sequence
  Synthetic
ggaguccccugggccuggaccgcuucccagag

SEQ ID NO: 6577 - RNA, 32 nt, Artificial Sequence
  Synthetic
gaguccccugggccuggaccgcuucccagagg

SEQ ID NO: 6578 - RNA, 32 nt, Artificial Sequence
  Synthetic
aguccccugggccuggaccgcuucccagaggc

SEQ ID NO: 6579 - RNA, 32 nt, Artificial Sequence
  Synthetic
guccccugggccuggaccgcuucccagaggcc

SEQ ID NO: 6580 - RNA, 32 nt, Artificial Sequence
  Synthetic
uccccugggccuggaccgcuucccagaggcca

SEQ ID NO: 6581 - RNA, 32 nt, Artificial Sequence
  Synthetic
ccccugggccuggaccgcuucccagaggccag

SEQ ID NO: 6582 - RNA, 32 nt, Artificial Sequence
  Synthetic
cccugggccuggaccgcuucccagaggccagg

SEQ ID NO: 6583 - RNA, 32 nt, Artificial Sequence
  Synthetic
ccugggccuggaccgcuucccagaggccagga

SEQ ID NO: 6584 - RNA, 32 nt, Artificial Sequence
  Synthetic
cugggccuggaccgcuucccagaggccaggaa

SEQ ID NO: 6585 - RNA, 32 nt, Artificial Sequence
  Synthetic
ugggccuggaccgcuucccagaggccaggaau

SEQ ID NO: 6586 - RNA, 32 nt, Artificial Sequence
  Synthetic
gggccuggaccgcuucccagaggccaggaauc

SEQ ID NO: 6587 - RNA, 32 nt, Artificial Sequence
  Synthetic
ggccuggaccgcuucccagaggccaggaaucu

SEQ ID NO: 6588 - RNA, 32 nt, Artificial Sequence
  Synthetic
gccuggaccgcuucccagaggccaggaaucug

SEQ ID NO: 6589 - RNA, 32 nt, Artificial Sequence
  Synthetic
ccuggaccgcuucccagaggccaggaaucugc

SEQ ID NO: 6590 - RNA, 32 nt, Artificial Sequence
  Synthetic
cuggaccgcuucccagaggccaggaaucugcc

SEQ ID NO: 6591 - RNA, 32 nt, Artificial Sequence
  Synthetic
uggaccgcuucccagaggccaggaaucugcca

SEQ ID NO: 6592 - RNA, 32 nt, Artificial Sequence
  Synthetic
ggaccgcuucccagaggccaggaaucugccau

SEQ ID NO: 6593 - RNA, 32 nt, Artificial Sequence
  Synthetic
gaccgcuucccagaggccaggaaucugccauu

SEQ ID NO: 6594 - RNA, 32 nt, Artificial Sequence
  Synthetic
accgcuucccagaggccaggaaucugccauua

SEQ ID NO: 6595 - RNA, 32 nt, Artificial Sequence
  Synthetic
ccgcuucccagaggccaggaaucugccauuac

SEQ ID NO: 6596 - RNA, 32 nt, Artificial Sequence
  Synthetic
cgcuucccagaggccaggaaucugccauuacu

SEQ ID NO: 6597 - RNA, 32 nt, Artificial Sequence
  Synthetic
gcuucccagaggccaggaaucugccauuacuc

SEQ ID NO: 6598 - RNA, 32 nt, Artificial Sequence
  Synthetic
cuucccagaggccaggaaucugccauuacucu

SEQ ID NO: 6599 - RNA, 32 nt, Artificial Sequence
  Synthetic
uucccagaggccaggaaucugccauuacucug

SEQ ID NO: 6600 - RNA, 32 nt, Artificial Sequence
  Synthetic
ucccagaggccaggaaucugccauuacucugc

SEQ ID NO: 6601 - RNA, 32 nt, Artificial Sequence
  Synthetic
cccagaggccaggaaucugccauuacucugcg

SEQ ID NO: 6602 - RNA, 32 nt, Artificial Sequence
  Synthetic
ccagaggccaggaaucugccauuacucugcgg

SEQ ID NO: 6603 - RNA, 32 nt, Artificial Sequence
  Synthetic
cagaggccaggaaucugccauuacucugcggu

SEQ ID NO: 6604 - RNA, 32 nt, Artificial Sequence
  Synthetic
agaggccaggaaucugccauuacucugcggug

SEQ ID NO: 6605 - RNA, 32 nt, Artificial Sequence
  Synthetic
gaggccaggaaucugccauuacucugcggugg

SEQ ID NO: 6606 - RNA, 32 nt, Artificial Sequence
  Synthetic
aggccaggaaucugccauuacucugcgguggu

SEQ ID NO: 6607 - RNA, 32 nt, Artificial Sequence
  Synthetic
ggccaggaaucugccauuacucugcgguggug

SEQ ID NO: 6608 - RNA, 32 nt, Artificial Sequence
  Synthetic
gccaggaaucugccauuacucugcgguggugc

SEQ ID NO: 6609 - RNA, 32 nt, Artificial Sequence
  Synthetic
ccaggaaucugccauuacucugcgguggugcc

SEQ ID NO: 6610 - RNA, 32 nt, Artificial Sequence
  Synthetic
caggaaucugccauuacucugcgguggugcca

SEQ ID NO: 6611 - RNA, 32 nt, Artificial Sequence
  Synthetic
aggaaucugccauuacucugcgguggugccag

SEQ ID NO: 6612 - RNA, 32 nt, Artificial Sequence
  Synthetic
ggaaucugccauuacucugcgguggugccaga

SEQ ID NO: 6613 - RNA, 32 nt, Artificial Sequence
  Synthetic
gaaucugccauuacucugcgguggugccagag

SEQ ID NO: 6614 - RNA, 32 nt, Artificial Sequence
  Synthetic
aaucugccauuacucugcgguggugccagagg

SEQ ID NO: 6615 - RNA, 32 nt, Artificial Sequence
  Synthetic
aucugccauuacucugcgguggugccagaggu

SEQ ID NO: 6616 - RNA, 32 nt, Artificial Sequence
  Synthetic
ucugccauuacucugcgguggugccagagguu

SEQ ID NO: 6617 - RNA, 32 nt, Artificial Sequence
  Synthetic
cugccauuacucugcgguggugccagagguuu

SEQ ID NO: 6618 - RNA, 32 nt, Artificial Sequence
  Synthetic
ugccauuacucugcgguggugccagagguuuu

SEQ ID NO: 6619 - RNA, 32 nt, Artificial Sequence
  Synthetic
gccauuacucugcgguggugccagagguuuua

SEQ ID NO: 6620 - RNA, 32 nt, Artificial Sequence
  Synthetic
ccauuacucugcgguggugccagagguuuuag

SEQ ID NO: 6621 - RNA, 32 nt, Artificial Sequence
  Synthetic
cauuacucugcgguggugccagagguuuuagg

SEQ ID NO: 6622 - RNA, 32 nt, Artificial Sequence
  Synthetic
auuacucugcgguggugccagagguuuuagga

SEQ ID NO: 6623 - RNA, 32 nt, Artificial Sequence
  Synthetic
uuacucugcgguggugccagagguuuuaggaa

SEQ ID NO: 6624 - RNA, 32 nt, Artificial Sequence
  Synthetic
uacucugcgguggugccagagguuuuaggaaa

SEQ ID NO: 6625 - RNA, 32 nt, Artificial Sequence
  Synthetic
acucugcgguggugccagagguuuuaggaaac

SEQ ID NO: 6626 - RNA, 32 nt, Artificial Sequence
  Synthetic
cucugcgguggugccagagguuuuaggaaacc

SEQ ID NO: 6627 - RNA, 32 nt, Artificial Sequence
  Synthetic
ucugcgguggugccagagguuuuaggaaaccu

SEQ ID NO: 6628 - RNA, 32 nt, Artificial Sequence
  Synthetic
cugcgguggugccagagguuuuaggaaaccug

SEQ ID NO: 6629 - RNA, 32 nt, Artificial Sequence
  Synthetic
ugcgguggugccagagguuuuaggaaaccugg

SEQ ID NO: 6630 - RNA, 32 nt, Artificial Sequence
  Synthetic
gcgguggugccagagguuuuaggaaaccuggc

SEQ ID NO: 6631 - RNA, 32 nt, Artificial Sequence
  Synthetic
cgguggugccagagguuuuaggaaaccuggca

SEQ ID NO: 6632 - RNA, 32 nt, Artificial Sequence
  Synthetic
gguggugccagagguuuuaggaaaccuggcau

SEQ ID NO: 6633 - RNA, 32 nt, Artificial Sequence
  Synthetic
guggugccagagguuuuaggaaaccuggcaug

SEQ ID NO: 6634 - RNA, 32 nt, Artificial Sequence
  Synthetic
uggugccagagguuuuaggaaaccuggcaugg

SEQ ID NO: 6635 - RNA, 32 nt, Artificial Sequence
  Synthetic
ggugccagagguuuuaggaaaccuggcauggu

SEQ ID NO: 6636 - RNA, 32 nt, Artificial Sequence
  Synthetic
gugccagagguuuuaggaaaccuggcauggug

SEQ ID NO: 6637 - RNA, 32 nt, Artificial Sequence
  Synthetic
ugccagagguuuuaggaaaccuggcauggugc

SEQ ID NO: 6638 - RNA, 32 nt, Artificial Sequence
  Synthetic
gccagagguuuuaggaaaccuggcauggugcu

SEQ ID NO: 6639 - RNA, 32 nt, Artificial Sequence
  Synthetic
ccagagguuuuaggaaaccuggcauggugcuu

SEQ ID NO: 6640 - RNA, 32 nt, Artificial Sequence
  Synthetic
cagagguuuuaggaaaccuggcauggugcuuu

SEQ ID NO: 6641 - RNA, 32 nt, Artificial Sequence
  Synthetic
agagguuuuaggaaaccuggcauggugcuuuc

SEQ ID NO: 6642 - RNA, 32 nt, Artificial Sequence
  Synthetic
gagguuuuaggaaaccuggcauggugcuuuca

SEQ ID NO: 6643 - RNA, 32 nt, Artificial Sequence
  Synthetic
agguuuuaggaaaccuggcauggugcuuucag

SEQ ID NO: 6644 - RNA, 32 nt, Artificial Sequence
  Synthetic
gguuuuaggaaaccuggcauggugcuuucagg

SEQ ID NO: 6645 - RNA, 32 nt, Artificial Sequence
  Synthetic
guuuuaggaaaccuggcauggugcuuucaggu

SEQ ID NO: 6646 - RNA, 32 nt, Artificial Sequence
  Synthetic
uuuuaggaaaccuggcauggugcuuucagguc

SEQ ID NO: 6647 - RNA, 32 nt, Artificial Sequence
  Synthetic
uuuaggaaaccuggcauggugcuuucaggucu

SEQ ID NO: 6648 - RNA, 32 nt, Artificial Sequence
  Synthetic
uuaggaaaccuggcauggugcuuucaggucug

SEQ ID NO: 6649 - RNA, 32 nt, Artificial Sequence
  Synthetic
uaggaaaccuggcauggugcuuucaggucugg

SEQ ID NO: 6650 - RNA, 32 nt, Artificial Sequence
  Synthetic
aggaaaccuggcauggugcuuucaggucuggg

SEQ ID NO: 6651 - RNA, 32 nt, Artificial Sequence
  Synthetic
ggaaaccuggcauggugcuuucaggucugggg

SEQ ID NO: 6652 - RNA, 32 nt, Artificial Sequence
  Synthetic
gaaaccuggcauggugcuuucaggucuggggc

SEQ ID NO: 6653 - RNA, 32 nt, Artificial Sequence
  Synthetic
aaaccuggcauggugcuuucaggucuggggcu

SEQ ID NO: 6654 - RNA, 32 nt, Artificial Sequence
  Synthetic
aaccuggcauggugcuuucaggucuggggcuu

SEQ ID NO: 6655 - RNA, 32 nt, Artificial Sequence
  Synthetic
accuggcauggugcuuucaggucuggggcuuu

SEQ ID NO: 6656 - RNA, 32 nt, Artificial Sequence
  Synthetic
ccuggcauggugcuuucaggucuggggcuuuu

SEQ ID NO: 6657 - RNA, 32 nt, Artificial Sequence
  Synthetic
cuggcauggugcuuucaggucuggggcuuuua

SEQ ID NO: 6658 - RNA, 32 nt, Artificial Sequence
  Synthetic
uggcauggugcuuucaggucuggggcuuuuag

SEQ ID NO: 6659 - RNA, 32 nt, Artificial Sequence
  Synthetic
ggcauggugcuuucaggucuggggcuuuuaga

SEQ ID NO: 6660 - RNA, 32 nt, Artificial Sequence
  Synthetic
gcauggugcuuucaggucuggggcuuuuagag

SEQ ID NO: 6661 - RNA, 32 nt, Artificial Sequence
  Synthetic
cauggugcuuucaggucuggggcuuuuagagc

SEQ ID NO: 6662 - RNA, 32 nt, Artificial Sequence
  Synthetic
auggugcuuucaggucuggggcuuuuagagcc

SEQ ID NO: 6663 - RNA, 32 nt, Artificial Sequence
  Synthetic
uggugcuuucaggucuggggcuuuuagagccc

SEQ ID NO: 6664 - RNA, 32 nt, Artificial Sequence
  Synthetic
ggugcuuucaggucuggggcuuuuagagcccc

SEQ ID NO: 6665 - RNA, 32 nt, Artificial Sequence
  Synthetic
gugcuuucaggucuggggcuuuuagagccccc

SEQ ID NO: 6666 - RNA, 32 nt, Artificial Sequence
  Synthetic
ugcuuucaggucuggggcuuuuagagcccccc

SEQ ID NO: 6667 - RNA, 32 nt, Artificial Sequence
  Synthetic
gcuuucaggucuggggcuuuuagagccccccg

SEQ ID NO: 6668 - RNA, 32 nt, Artificial Sequence
  Synthetic
cuuucaggucuggggcuuuuagagccccccgu

SEQ ID NO: 6669 - RNA, 32 nt, Artificial Sequence
  Synthetic
uuucaggucuggggcuuuuagagccccccgug

SEQ ID NO: 6670 - RNA, 32 nt, Artificial Sequence
  Synthetic
uucaggucuggggcuuuuagagccccccgugu

SEQ ID NO: 6671 - RNA, 32 nt, Artificial Sequence
  Synthetic
ucaggucuggggcuuuuagagccccccgugug

SEQ ID NO: 6672 - RNA, 32 nt, Artificial Sequence
  Synthetic
caggucuggggcuuuuagagccccccgugugg

SEQ ID NO: 6673 - RNA, 32 nt, Artificial Sequence
  Synthetic
aggucuggggcuuuuagagccccccguguggc

SEQ ID NO: 6674 - RNA, 32 nt, Artificial Sequence
  Synthetic
ggucuggggcuuuuagagccccccguguggcu

SEQ ID NO: 6675 - RNA, 32 nt, Artificial Sequence
  Synthetic
gucuggggcuuuuagagccccccguguggcuu

SEQ ID NO: 6676 - RNA, 32 nt, Artificial Sequence
  Synthetic
ucuggggcuuuuagagccccccguguggcuua

SEQ ID NO: 6677 - RNA, 32 nt, Artificial Sequence
  Synthetic
cuggggcuuuuagagccccccguguggcuuac

SEQ ID NO: 6678 - RNA, 32 nt, Artificial Sequence
  Synthetic
uggggcuuuuagagccccccguguggcuuaca

SEQ ID NO: 6679 - RNA, 32 nt, Artificial Sequence
  Synthetic
ggggcuuuuagagccccccguguggcuuacaa

SEQ ID NO: 6680 - RNA, 32 nt, Artificial Sequence
  Synthetic
gggcuuuuagagccccccguguggcuuacaaa

SEQ ID NO: 6681 - RNA, 32 nt, Artificial Sequence
  Synthetic
ggcuuuuagagccccccguguggcuuacaaau

SEQ ID NO: 6682 - RNA, 32 nt, Artificial Sequence
  Synthetic
gcuuuuagagccccccguguggcuuacaaauu

SEQ ID NO: 6683 - RNA, 32 nt, Artificial Sequence
  Synthetic
cuuuuagagccccccguguggcuuacaaauuc

SEQ ID NO: 6684 - RNA, 32 nt, Artificial Sequence
  Synthetic
uuuuagagccccccguguggcuuacaaauucu

SEQ ID NO: 6685 - RNA, 32 nt, Artificial Sequence
  Synthetic
uuuagagccccccguguggcuuacaaauucua

SEQ ID NO: 6686 - RNA, 32 nt, Artificial Sequence
  Synthetic
uuagagccccccguguggcuuacaaauucuac

SEQ ID NO: 6687 - RNA, 32 nt, Artificial Sequence
  Synthetic
uagagccccccguguggcuuacaaauucuaca

SEQ ID NO: 6688 - RNA, 32 nt, Artificial Sequence
  Synthetic
agagccccccguguggcuuacaaauucuacag

SEQ ID NO: 6689 - RNA, 32 nt, Artificial Sequence
  Synthetic
gagccccccguguggcuuacaaauucuacagc

SEQ ID NO: 6690 - RNA, 32 nt, Artificial Sequence
  Synthetic
agccccccguguggcuuacaaauucuacagca

SEQ ID NO: 6691 - RNA, 32 nt, Artificial Sequence
  Synthetic
gccccccguguggcuuacaaauucuacagcau

SEQ ID NO: 6692 - RNA, 32 nt, Artificial Sequence
  Synthetic
ccccccguguggcuuacaaauucuacagcaua

SEQ ID NO: 6693 - RNA, 32 nt, Artificial Sequence
  Synthetic
cccccguguggcuuacaaauucuacagcauac

SEQ ID NO: 6694 - RNA, 32 nt, Artificial Sequence
  Synthetic
ccccguguggcuuacaaauucuacagcauaca

SEQ ID NO: 6695 - RNA, 32 nt, Artificial Sequence
  Synthetic
cccguguggcuuacaaauucuacagcauacag

SEQ ID NO: 6696 - RNA, 32 nt, Artificial Sequence
  Synthetic
ccguguggcuuacaaauucuacagcauacaga

SEQ ID NO: 6697 - RNA, 32 nt, Artificial Sequence
  Synthetic
cguguggcuuacaaauucuacagcauacagag

SEQ ID NO: 6698 - RNA, 32 nt, Artificial Sequence
  Synthetic
guguggcuuacaaauucuacagcauacagagc

SEQ ID NO: 6699 - RNA, 32 nt, Artificial Sequence
  Synthetic
uguggcuuacaaauucuacagcauacagagca

SEQ ID NO: 6700 - RNA, 32 nt, Artificial Sequence
  Synthetic
guggcuuacaaauucuacagcauacagagcag

SEQ ID NO: 6701 - RNA, 32 nt, Artificial Sequence
  Synthetic
uggcuuacaaauucuacagcauacagagcagg

SEQ ID NO: 6702 - RNA, 32 nt, Artificial Sequence
  Synthetic
ggcuuacaaauucuacagcauacagagcaggc

SEQ ID NO: 6703 - RNA, 32 nt, Artificial Sequence
  Synthetic
gcuuacaaauucuacagcauacagagcaggcc

SEQ ID NO: 6704 - RNA, 32 nt, Artificial Sequence
  Synthetic
cuuacaaauucuacagcauacagagcaggcca

SEQ ID NO: 6705 - RNA, 32 nt, Artificial Sequence
  Synthetic
uuacaaauucuacagcauacagagcaggccac

SEQ ID NO: 6706 - RNA, 32 nt, Artificial Sequence
  Synthetic
uacaaauucuacagcauacagagcaggccacg

SEQ ID NO: 6707 - RNA, 32 nt, Artificial Sequence
  Synthetic
acaaauucuacagcauacagagcaggccacgc

SEQ ID NO: 6708 - RNA, 32 nt, Artificial Sequence
  Synthetic
caaauucuacagcauacagagcaggccacgcu

SEQ ID NO: 6709 - RNA, 32 nt, Artificial Sequence
  Synthetic
aaauucuacagcauacagagcaggccacgcuc

SEQ ID NO: 6710 - RNA, 32 nt, Artificial Sequence
  Synthetic
aauucuacagcauacagagcaggccacgcuca

SEQ ID NO: 6711 - RNA, 32 nt, Artificial Sequence
  Synthetic
auucuacagcauacagagcaggccacgcucag

SEQ ID NO: 6712 - RNA, 32 nt, Artificial Sequence
  Synthetic
uucuacagcauacagagcaggccacgcucagg

SEQ ID NO: 6713 - RNA, 32 nt, Artificial Sequence
  Synthetic
ucuacagcauacagagcaggccacgcucaggc

SEQ ID NO: 6714 - RNA, 32 nt, Artificial Sequence
  Synthetic
cuacagcauacagagcaggccacgcucaggcc

SEQ ID NO: 6715 - RNA, 32 nt, Artificial Sequence
  Synthetic
uacagcauacagagcaggccacgcucaggccc

SEQ ID NO: 6716 - RNA, 32 nt, Artificial Sequence
  Synthetic
acagcauacagagcaggccacgcucaggcccg

SEQ ID NO: 6717 - RNA, 32 nt, Artificial Sequence
  Synthetic
cagcauacagagcaggccacgcucaggcccgg

SEQ ID NO: 6718 - RNA, 32 nt, Artificial Sequence
  Synthetic
agcauacagagcaggccacgcucaggcccggc

SEQ ID NO: 6719 - RNA, 32 nt, Artificial Sequence
  Synthetic
gcauacagagcaggccacgcucaggcccggca

SEQ ID NO: 6720 - RNA, 32 nt, Artificial Sequence
  Synthetic
cauacagagcaggccacgcucaggcccggcau

SEQ ID NO: 6721 - RNA, 32 nt, Artificial Sequence
  Synthetic
auacagagcaggccacgcucaggcccggcaug

SEQ ID NO: 6722 - RNA, 32 nt, Artificial Sequence
  Synthetic
uacagagcaggccacgcucaggcccggcaugc

SEQ ID NO: 6723 - RNA, 32 nt, Artificial Sequence
  Synthetic
acagagcaggccacgcucaggcccggcaugcg

SEQ ID NO: 6724 - RNA, 32 nt, Artificial Sequence
  Synthetic
cagagcaggccacgcucaggcccggcaugcgg

SEQ ID NO: 6725 - RNA, 32 nt, Artificial Sequence
  Synthetic
agagcaggccacgcucaggcccggcaugcggg

SEQ ID NO: 6726 - RNA, 32 nt, Artificial Sequence
  Synthetic
gagcaggccacgcucaggcccggcaugcgggc

SEQ ID NO: 6727 - RNA, 32 nt, Artificial Sequence
  Synthetic
agcaggccacgcucaggcccggcaugcgggcc

SEQ ID NO: 6728 - RNA, 32 nt, Artificial Sequence
  Synthetic
gcaggccacgcucaggcccggcaugcgggcca

SEQ ID NO: 6729 - RNA, 32 nt, Artificial Sequence
  Synthetic
caggccacgcucaggcccggcaugcgggccac

SEQ ID NO: 6730 - RNA, 32 nt, Artificial Sequence
  Synthetic
aggccacgcucaggcccggcaugcgggccacc

SEQ ID NO: 6731 - RNA, 32 nt, Artificial Sequence
  Synthetic
ggccacgcucaggcccggcaugcgggccacca

SEQ ID NO: 6732 - RNA, 32 nt, Artificial Sequence
  Synthetic
gccacgcucaggcccggcaugcgggccaccaa

SEQ ID NO: 6733 - RNA, 32 nt, Artificial Sequence
  Synthetic
ccacgcucaggcccggcaugcgggccaccaag

SEQ ID NO: 6734 - RNA, 32 nt, Artificial Sequence
  Synthetic
cacgcucaggcccggcaugcgggccaccaagu

SEQ ID NO: 6735 - RNA, 32 nt, Artificial Sequence
  Synthetic
acgcucaggcccggcaugcgggccaccaaguu

SEQ ID NO: 6736 - RNA, 32 nt, Artificial Sequence
  Synthetic
cgcucaggcccggcaugcgggccaccaaguuc

SEQ ID NO: 6737 - RNA, 32 nt, Artificial Sequence
  Synthetic
gcucaggcccggcaugcgggccaccaaguucu

SEQ ID NO: 6738 - RNA, 32 nt, Artificial Sequence
  Synthetic
cucaggcccggcaugcgggccaccaaguucug

SEQ ID NO: 6739 - RNA, 32 nt, Artificial Sequence
  Synthetic
ucaggcccggcaugcgggccaccaaguucugg

SEQ ID NO: 6740 - RNA, 32 nt, Artificial Sequence
  Synthetic
caggcccggcaugcgggccaccaaguucugga

SEQ ID NO: 6741 - RNA, 32 nt, Artificial Sequence
  Synthetic
aggcccggcaugcgggccaccaaguucuggaa

SEQ ID NO: 6742 - RNA, 32 nt, Artificial Sequence
  Synthetic
ggcccggcaugcgggccaccaaguucuggaaa

SEQ ID NO: 6743 - RNA, 32 nt, Artificial Sequence
  Synthetic
gcccggcaugcgggccaccaaguucuggaaac

SEQ ID NO: 6744 - RNA, 32 nt, Artificial Sequence
  Synthetic
cccggcaugcgggccaccaaguucuggaaacc

SEQ ID NO: 6745 - RNA, 32 nt, Artificial Sequence
  Synthetic
ccggcaugcgggccaccaaguucuggaaacca

SEQ ID NO: 6746 - RNA, 32 nt, Artificial Sequence
  Synthetic
cggcaugcgggccaccaaguucuggaaaccac

SEQ ID NO: 6747 - RNA, 32 nt, Artificial Sequence
  Synthetic
ggcaugcgggccaccaaguucuggaaaccacg

SEQ ID NO: 6748 - RNA, 32 nt, Artificial Sequence
  Synthetic
gcaugcgggccaccaaguucuggaaaccacgu

SEQ ID NO: 6749 - RNA, 32 nt, Artificial Sequence
  Synthetic
caugcgggccaccaaguucuggaaaccacgug

SEQ ID NO: 6750 - RNA, 32 nt, Artificial Sequence
  Synthetic
augcgggccaccaaguucuggaaaccacgugg

SEQ ID NO: 6751 - RNA, 32 nt, Artificial Sequence
  Synthetic
ugcgggccaccaaguucuggaaaccacguggu

SEQ ID NO: 6752 - RNA, 32 nt, Artificial Sequence
  Synthetic
gcgggccaccaaguucuggaaaccacguggug

SEQ ID NO: 6753 - RNA, 32 nt, Artificial Sequence
  Synthetic
cgggccaccaaguucuggaaaccacguggugu

SEQ ID NO: 6754 - RNA, 32 nt, Artificial Sequence
  Synthetic
gggccaccaaguucuggaaaccacgugguguc

SEQ ID NO: 6755 - RNA, 32 nt, Artificial Sequence
  Synthetic
ggccaccaaguucuggaaaccacguggugucc

SEQ ID NO: 6756 - RNA, 32 nt, Artificial Sequence
  Synthetic
gccaccaaguucuggaaaccacgugguguccc

SEQ ID NO: 6757 - RNA, 32 nt, Artificial Sequence
  Synthetic
ccaccaaguucuggaaaccacguggugucccu

SEQ ID NO: 6758 - RNA, 32 nt, Artificial Sequence
  Synthetic
caccaaguucuggaaaccacguggugucccug

SEQ ID NO: 6759 - RNA, 32 nt, Artificial Sequence
  Synthetic
accaaguucuggaaaccacguggugucccugc

SEQ ID NO: 6760 - RNA, 32 nt, Artificial Sequence
  Synthetic
ccaaguucuggaaaccacguggugucccugcg

SEQ ID NO: 6761 - RNA, 32 nt, Artificial Sequence
  Synthetic
caaguucuggaaaccacguggugucccugcga

SEQ ID NO: 6762 - RNA, 32 nt, Artificial Sequence
  Synthetic
aaguucuggaaaccacguggugucccugcgaa

SEQ ID NO: 6763 - RNA, 32 nt, Artificial Sequence
  Synthetic
aguucuggaaaccacguggugucccugcgaau

SEQ ID NO: 6764 - RNA, 32 nt, Artificial Sequence
  Synthetic
guucuggaaaccacguggugucccugcgaaug

SEQ ID NO: 6765 - RNA, 32 nt, Artificial Sequence
  Synthetic
uucuggaaaccacguggugucccugcgaaugg

SEQ ID NO: 6766 - RNA, 32 nt, Artificial Sequence
  Synthetic
ucuggaaaccacguggugucccugcgaauggg

SEQ ID NO: 6767 - RNA, 32 nt, Artificial Sequence
  Synthetic
cuggaaaccacguggugucccugcgaaugggg

SEQ ID NO: 6768 - RNA, 32 nt, Artificial Sequence
  Synthetic
uggaaaccacguggugucccugcgaauggggc

SEQ ID NO: 6769 - RNA, 32 nt, Artificial Sequence
  Synthetic
ggaaaccacguggugucccugcgaauggggcg

SEQ ID NO: 6770 - RNA, 32 nt, Artificial Sequence
  Synthetic
gaaaccacguggugucccugcgaauggggcga

SEQ ID NO: 6771 - RNA, 32 nt, Artificial Sequence
  Synthetic
aaaccacguggugucccugcgaauggggcgau

SEQ ID NO: 6772 - RNA, 32 nt, Artificial Sequence
  Synthetic
aaccacguggugucccugcgaauggggcgauc

SEQ ID NO: 6773 - RNA, 32 nt, Artificial Sequence
  Synthetic
accacguggugucccugcgaauggggcgauca

SEQ ID NO: 6774 - RNA, 32 nt, Artificial Sequence
  Synthetic
ccacguggugucccugcgaauggggcgaucaa

SEQ ID NO: 6775 - RNA, 32 nt, Artificial Sequence
  Synthetic
cacguggugucccugcgaauggggcgaucaag

SEQ ID NO: 6776 - RNA, 32 nt, Artificial Sequence
  Synthetic
acguggugucccugcgaauggggcgaucaagu

SEQ ID NO: 6777 - RNA, 32 nt, Artificial Sequence
  Synthetic
cguggugucccugcgaauggggcgaucaaguc

SEQ ID NO: 6778 - RNA, 32 nt, Artificial Sequence
  Synthetic
guggugucccugcgaauggggcgaucaagucc

SEQ ID NO: 6779 - RNA, 32 nt, Artificial Sequence
  Synthetic
uggugucccugcgaauggggcgaucaagucca

SEQ ID NO: 6780 - RNA, 32 nt, Artificial Sequence
  Synthetic
gugucccugcgaauggggcgaucaaguccaga

SEQ ID NO: 6781 - RNA, 32 nt, Artificial Sequence
  Synthetic
ugucccugcgaauggggcgaucaaguccagag

SEQ ID NO: 6782 - RNA, 32 nt, Artificial Sequence
  Synthetic
gucccugcgaauggggcgaucaaguccagagc

SEQ ID NO: 6783 - RNA, 32 nt, Artificial Sequence
  Synthetic
ucccugcgaauggggcgaucaaguccagagcc

SEQ ID NO: 6784 - RNA, 32 nt, Artificial Sequence
  Synthetic
cccugcgaauggggcgaucaaguccagagccg

SEQ ID NO: 6785 - RNA, 32 nt, Artificial Sequence
  Synthetic
ccugcgaauggggcgaucaaguccagagccgg

SEQ ID NO: 6786 - RNA, 32 nt, Artificial Sequence
  Synthetic
cugcgaauggggcgaucaaguccagagccggg

SEQ ID NO: 6787 - RNA, 32 nt, Artificial Sequence
  Synthetic
ugcgaauggggcgaucaaguccagagccgggg

SEQ ID NO: 6788 - RNA, 32 nt, Artificial Sequence
  Synthetic
gcgaauggggcgaucaaguccagagccggggc

SEQ ID NO: 6789 - RNA, 32 nt, Artificial Sequence
  Synthetic
cgaauggggcgaucaaguccagagccggggca

SEQ ID NO: 6790 - RNA, 32 nt, Artificial Sequence
  Synthetic
gaauggggcgaucaaguccagagccggggcac

SEQ ID NO: 6791 - RNA, 32 nt, Artificial Sequence
  Synthetic
aauggggcgaucaaguccagagccggggcacu

SEQ ID NO: 6792 - RNA, 32 nt, Artificial Sequence
  Synthetic
auggggcgaucaaguccagagccggggcacuu

SEQ ID NO: 6793 - RNA, 32 nt, Artificial Sequence
  Synthetic
uggggcgaucaaguccagagccggggcacuuu

SEQ ID NO: 6794 - RNA, 32 nt, Artificial Sequence
  Synthetic
ggggcgaucaaguccagagccggggcacuuuc

SEQ ID NO: 6795 - RNA, 32 nt, Artificial Sequence
  Synthetic
gggcgaucaaguccagagccggggcacuuuca

SEQ ID NO: 6796 - RNA, 32 nt, Artificial Sequence
  Synthetic
ggcgaucaaguccagagccggggcacuuucag

SEQ ID NO: 6797 - RNA, 32 nt, Artificial Sequence
  Synthetic
gcgaucaaguccagagccggggcacuuucaga

SEQ ID NO: 6798 - RNA, 32 nt, Artificial Sequence
  Synthetic
cgaucaaguccagagccggggcacuuucagag

SEQ ID NO: 6799 - RNA, 32 nt, Artificial Sequence
  Synthetic
gaucaaguccagagccggggcacuuucagagu

SEQ ID NO: 6800 - RNA, 32 nt, Artificial Sequence
  Synthetic
aucaaguccagagccggggcacuuucagaguu

SEQ ID NO: 6801 - RNA, 32 nt, Artificial Sequence
  Synthetic
ucaaguccagagccggggcacuuucagaguuu

SEQ ID NO: 6802 - RNA, 32 nt, Artificial Sequence
  Synthetic
caaguccagagccggggcacuuucagaguuug

SEQ ID NO: 6803 - RNA, 32 nt, Artificial Sequence
  Synthetic
aaguccagagccggggcacuuucagaguuuga

SEQ ID NO: 6804 - RNA, 32 nt, Artificial Sequence
  Synthetic
aguccagagccggggcacuuucagaguuugaa

SEQ ID NO: 6805 - RNA, 32 nt, Artificial Sequence
  Synthetic
guccagagccggggcacuuucagaguuugaag

SEQ ID NO: 6806 - RNA, 32 nt, Artificial Sequence
  Synthetic
uccagagccggggcacuuucagaguuugaagg

SEQ ID NO: 6807 - RNA, 32 nt, Artificial Sequence
  Synthetic
ccagagccggggcacuuucagaguuugaaggu

SEQ ID NO: 6808 - RNA, 32 nt, Artificial Sequence
  Synthetic
cagagccggggcacuuucagaguuugaaggua

SEQ ID NO: 6809 - RNA, 32 nt, Artificial Sequence
  Synthetic
agagccggggcacuuucagaguuugaagguaa

SEQ ID NO: 6810 - RNA, 32 nt, Artificial Sequence
  Synthetic
gagccggggcacuuucagaguuugaagguaac

SEQ ID NO: 6811 - RNA, 32 nt, Artificial Sequence
  Synthetic
agccggggcacuuucagaguuugaagguaacu

SEQ ID NO: 6812 - RNA, 32 nt, Artificial Sequence
  Synthetic
gccggggcacuuucagaguuugaagguaacug

SEQ ID NO: 6813 - RNA, 32 nt, Artificial Sequence
  Synthetic
ccggggcacuuucagaguuugaagguaacuga

SEQ ID NO: 6814 - RNA, 32 nt, Artificial Sequence
  Synthetic
cggggcacuuucagaguuugaagguaacugag

SEQ ID NO: 6815 - RNA, 32 nt, Artificial Sequence
  Synthetic
ggggcacuuucagaguuugaagguaacugaga

SEQ ID NO: 6816 - RNA, 32 nt, Artificial Sequence
  Synthetic
gggcacuuucagaguuugaagguaacugagag

SEQ ID NO: 6817 - RNA, 32 nt, Artificial Sequence
  Synthetic
ggcacuuucagaguuugaagguaacugagagc

SEQ ID NO: 6818 - RNA, 32 nt, Artificial Sequence
  Synthetic
gcacuuucagaguuugaagguaacugagagca

SEQ ID NO: 6819 - RNA, 32 nt, Artificial Sequence
  Synthetic
cacuuucagaguuugaagguaacugagagcag

SEQ ID NO: 6820 - RNA, 32 nt, Artificial Sequence
  Synthetic
acuuucagaguuugaagguaacugagagcaga

SEQ ID NO: 6821 - RNA, 32 nt, Artificial Sequence
  Synthetic
cuuucagaguuugaagguaacugagagcagau

SEQ ID NO: 6822 - RNA, 32 nt, Artificial Sequence
  Synthetic
uuucagaguuugaagguaacugagagcagaug

SEQ ID NO: 6823 - RNA, 32 nt, Artificial Sequence
  Synthetic
uucagaguuugaagguaacugagagcagaugg

SEQ ID NO: 6824 - RNA, 32 nt, Artificial Sequence
  Synthetic
ucagaguuugaagguaacugagagcagauggu

SEQ ID NO: 6825 - RNA, 32 nt, Artificial Sequence
  Synthetic
cagaguuugaagguaacugagagcagaugguc

SEQ ID NO: 6826 - RNA, 32 nt, Artificial Sequence
  Synthetic
agaguuugaagguaacugagagcagauggucc

SEQ ID NO: 6827 - RNA, 32 nt, Artificial Sequence
  Synthetic
gaguuugaagguaacugagagcagaugguccu

SEQ ID NO: 6828 - RNA, 32 nt, Artificial Sequence
  Synthetic
aguuugaagguaacugagagcagaugguccuc

SEQ ID NO: 6829 - RNA, 32 nt, Artificial Sequence
  Synthetic
guuugaagguaacugagagcagaugguccucc

SEQ ID NO: 6830 - RNA, 32 nt, Artificial Sequence
  Synthetic
uuugaagguaacugagagcagaugguccucca

SEQ ID NO: 6831 - RNA, 32 nt, Artificial Sequence
  Synthetic
uugaagguaacugagagcagaugguccuccau

SEQ ID NO: 6832 - RNA, 32 nt, Artificial Sequence
  Synthetic
ugaagguaacugagagcagaugguccuccauu

SEQ ID NO: 6833 - RNA, 32 nt, Artificial Sequence
  Synthetic
gaagguaacugagagcagaugguccuccauuu

SEQ ID NO: 6834 - RNA, 32 nt, Artificial Sequence
  Synthetic
aagguaacugagagcagaugguccuccauuuc

SEQ ID NO: 6835 - RNA, 32 nt, Artificial Sequence
  Synthetic
agguaacugagagcagaugguccuccauuuca

SEQ ID NO: 6836 - RNA, 32 nt, Artificial Sequence
  Synthetic
gguaacugagagcagaugguccuccauuucaa

SEQ ID NO: 6837 - RNA, 32 nt, Artificial Sequence
  Synthetic
guaacugagagcagaugguccuccauuucaac

SEQ ID NO: 6838 - RNA, 32 nt, Artificial Sequence
  Synthetic
uaacugagagcagaugguccuccauuucaacu

SEQ ID NO: 6839 - RNA, 32 nt, Artificial Sequence
  Synthetic
aacugagagcagaugguccuccauuucaacuc

SEQ ID NO: 6840 - RNA, 32 nt, Artificial Sequence
  Synthetic
acugagagcagaugguccuccauuucaacucc

SEQ ID NO: 6841 - RNA, 32 nt, Artificial Sequence
  Synthetic
cugagagcagaugguccuccauuucaacucca

SEQ ID NO: 6842 - RNA, 32 nt, Artificial Sequence
  Synthetic
ugagagcagaugguccuccauuucaacuccag

SEQ ID NO: 6843 - RNA, 32 nt, Artificial Sequence
  Synthetic
gagagcagaugguccuccauuucaacuccaga

SEQ ID NO: 6844 - RNA, 32 nt, Artificial Sequence
  Synthetic
agagcagaugguccuccauuucaacuccagaa

SEQ ID NO: 6845 - RNA, 32 nt, Artificial Sequence
  Synthetic
gagcagaugguccuccauuucaacuccagaag

SEQ ID NO: 6846 - RNA, 32 nt, Artificial Sequence
  Synthetic
agcagaugguccuccauuucaacuccagaagu

SEQ ID NO: 6847 - RNA, 32 nt, Artificial Sequence
  Synthetic
gcagaugguccuccauuucaacuccagaagug

SEQ ID NO: 6848 - RNA, 32 nt, Artificial Sequence
  Synthetic
cagaugguccuccauuucaacuccagaagugg

SEQ ID NO: 6849 - RNA, 32 nt, Artificial Sequence
  Synthetic
agaugguccuccauuucaacuccagaaguggg

SEQ ID NO: 6850 - RNA, 32 nt, Artificial Sequence
  Synthetic
gaugguccuccauuucaacuccagaagugggg

SEQ ID NO: 6851 - RNA, 32 nt, Artificial Sequence
  Synthetic
augguccuccauuucaacuccagaaguggggc

SEQ ID NO: 6852 - RNA, 32 nt, Artificial Sequence
  Synthetic
ugguccuccauuucaacuccagaaguggggcu

SEQ ID NO: 6853 - RNA, 32 nt, Artificial Sequence
  Synthetic
gguccuccauuucaacuccagaaguggggcuc

SEQ ID NO: 6854 - RNA, 32 nt, Artificial Sequence
  Synthetic
guccuccauuucaacuccagaaguggggcucu

SEQ ID NO: 6855 - RNA, 32 nt, Artificial Sequence
  Synthetic
uccuccauuucaacuccagaaguggggcucug

SEQ ID NO: 6856 - RNA, 32 nt, Artificial Sequence
  Synthetic
ccuccauuucaacuccagaaguggggcucugg

SEQ ID NO: 6857 - RNA, 32 nt, Artificial Sequence
  Synthetic
cuccauuucaacuccagaaguggggcucuggg

SEQ ID NO: 6858 - RNA, 32 nt, Artificial Sequence
  Synthetic
uccauuucaacuccagaaguggggcucuggga

SEQ ID NO: 6859 - RNA, 32 nt, Artificial Sequence
  Synthetic
ccauuucaacuccagaaguggggcucugggag

SEQ ID NO: 6860 - RNA, 32 nt, Artificial Sequence
  Synthetic
cauuucaacuccagaaguggggcucugggagg

SEQ ID NO: 6861 - RNA, 32 nt, Artificial Sequence
  Synthetic
auuucaacuccagaaguggggcucugggaggg

SEQ ID NO: 6862 - RNA, 32 nt, Artificial Sequence
  Synthetic
uuucaacuccagaaguggggcucugggaggga

SEQ ID NO: 6863 - RNA, 32 nt, Artificial Sequence
  Synthetic
uucaacuccagaaguggggcucugggagggau

SEQ ID NO: 6864 - RNA, 32 nt, Artificial Sequence
  Synthetic
ucaacuccagaaguggggcucugggagggaug

SEQ ID NO: 6865 - RNA, 32 nt, Artificial Sequence
  Synthetic
caacuccagaaguggggcucugggagggaugu

SEQ ID NO: 6866 - RNA, 32 nt, Artificial Sequence
  Synthetic
aacuccagaaguggggcucugggagggauguu

SEQ ID NO: 6867 - RNA, 32 nt, Artificial Sequence
  Synthetic
acuccagaaguggggcucugggagggauguuc

SEQ ID NO: 6868 - RNA, 32 nt, Artificial Sequence
  Synthetic
cuccagaaguggggcucugggagggauguucu

SEQ ID NO: 6869 - RNA, 32 nt, Artificial Sequence
  Synthetic
uccagaaguggggcucugggagggauguucua

SEQ ID NO: 6870 - RNA, 32 nt, Artificial Sequence
  Synthetic
ccagaaguggggcucugggagggauguucuag

SEQ ID NO: 6871 - RNA, 32 nt, Artificial Sequence
  Synthetic
cagaaguggggcucugggagggauguucuagc

SEQ ID NO: 6872 - RNA, 32 nt, Artificial Sequence
  Synthetic
agaaguggggcucugggagggauguucuagcc

SEQ ID NO: 6873 - RNA, 32 nt, Artificial Sequence
  Synthetic
gaaguggggcucugggagggauguucuagccc

SEQ ID NO: 6874 - RNA, 32 nt, Artificial Sequence
  Synthetic
aaguggggcucugggagggauguucuagcccu

SEQ ID NO: 6875 - RNA, 32 nt, Artificial Sequence
  Synthetic
aguggggcucugggagggauguucuagcccuc

SEQ ID NO: 6876 - RNA, 32 nt, Artificial Sequence
  Synthetic
guggggcucugggagggauguucuagcccucc

SEQ ID NO: 6877 - RNA, 32 nt, Artificial Sequence
  Synthetic
uggggcucugggagggauguucuagcccuccc

SEQ ID NO: 6878 - RNA, 32 nt, Artificial Sequence
  Synthetic
ggggcucugggagggauguucuagcccucccu

SEQ ID NO: 6879 - RNA, 32 nt, Artificial Sequence
  Synthetic
gggcucugggagggauguucuagcccucccug

SEQ ID NO: 6880 - RNA, 32 nt, Artificial Sequence
  Synthetic
ggcucugggagggauguucuagcccucccugg

SEQ ID NO: 6881 - RNA, 32 nt, Artificial Sequence
  Synthetic
gcucugggagggauguucuagcccucccuggc

SEQ ID NO: 6882 - RNA, 32 nt, Artificial Sequence
  Synthetic
cucugggagggauguucuagcccucccuggca

SEQ ID NO: 6883 - RNA, 32 nt, Artificial Sequence
  Synthetic
ucugggagggauguucuagcccucccuggcau

SEQ ID NO: 6884 - RNA, 32 nt, Artificial Sequence
  Synthetic
cugggagggauguucuagcccucccuggcaug

SEQ ID NO: 6885 - RNA, 32 nt, Artificial Sequence
  Synthetic
ugggagggauguucuagcccucccuggcaugu

SEQ ID NO: 6886 - RNA, 32 nt, Artificial Sequence
  Synthetic
gggagggauguucuagcccucccuggcauguc

SEQ ID NO: 6887 - RNA, 32 nt, Artificial Sequence
  Synthetic
ggagggauguucuagcccucccuggcauguca

SEQ ID NO: 6888 - RNA, 32 nt, Artificial Sequence
  Synthetic
gagggauguucuagcccucccuggcaugucag

SEQ ID NO: 6889 - RNA, 32 nt, Artificial Sequence
  Synthetic
agggauguucuagcccucccuggcaugucaga

SEQ ID NO: 6890 - RNA, 32 nt, Artificial Sequence
  Synthetic
gggauguucuagcccucccuggcaugucagag

SEQ ID NO: 6891 - RNA, 32 nt, Artificial Sequence
  Synthetic
ggauguucuagcccucccuggcaugucagagc

SEQ ID NO: 6892 - RNA, 32 nt, Artificial Sequence
  Synthetic
gauguucuagcccucccuggcaugucagagcc

SEQ ID NO: 6893 - RNA, 32 nt, Artificial Sequence
  Synthetic
auguucuagcccucccuggcaugucagagcca

SEQ ID NO: 6894 - RNA, 32 nt, Artificial Sequence
  Synthetic
uguucuagcccucccuggcaugucagagccag

SEQ ID NO: 6895 - RNA, 32 nt, Artificial Sequence
  Synthetic
guucuagcccucccuggcaugucagagccagg

SEQ ID NO: 6896 - RNA, 32 nt, Artificial Sequence
  Synthetic
uucuagcccucccuggcaugucagagccaggc

SEQ ID NO: 6897 - RNA, 32 nt, Artificial Sequence
  Synthetic
ucuagcccucccuggcaugucagagccaggcu

SEQ ID NO: 6898 - RNA, 32 nt, Artificial Sequence
  Synthetic
cuagcccucccuggcaugucagagccaggcuc

SEQ ID NO: 6899 - RNA, 32 nt, Artificial Sequence
  Synthetic
uagcccucccuggcaugucagagccaggcucu

SEQ ID NO: 6900 - RNA, 32 nt, Artificial Sequence
  Synthetic
agcccucccuggcaugucagagccaggcucug

SEQ ID NO: 6901 - RNA, 32 nt, Artificial Sequence
  Synthetic
gcccucccuggcaugucagagccaggcucugc

SEQ ID NO: 6902 - RNA, 32 nt, Artificial Sequence
  Synthetic
cccucccuggcaugucagagccaggcucugcc

SEQ ID NO: 6903 - RNA, 32 nt, Artificial Sequence
  Synthetic
ccucccuggcaugucagagccaggcucugccu

SEQ ID NO: 6904 - RNA, 32 nt, Artificial Sequence
  Synthetic
cucccuggcaugucagagccaggcucugccug

SEQ ID NO: 6905 - RNA, 32 nt, Artificial Sequence
  Synthetic
ucccuggcaugucagagccaggcucugccugg

SEQ ID NO: 6906 - RNA, 32 nt, Artificial Sequence
  Synthetic
cccuggcaugucagagccaggcucugccugga

SEQ ID NO: 6907 - RNA, 32 nt, Artificial Sequence
  Synthetic
ccuggcaugucagagccaggcucugccuggag

SEQ ID NO: 6908 - RNA, 32 nt, Artificial Sequence
  Synthetic
cuggcaugucagagccaggcucugccuggagg

SEQ ID NO: 6909 - RNA, 32 nt, Artificial Sequence
  Synthetic
uggcaugucagagccaggcucugccuggagga

SEQ ID NO: 6910 - RNA, 32 nt, Artificial Sequence
  Synthetic
ggcaugucagagccaggcucugccuggaggau

SEQ ID NO: 6911 - RNA, 32 nt, Artificial Sequence
  Synthetic
gcaugucagagccaggcucugccuggaggauc

SEQ ID NO: 6912 - RNA, 32 nt, Artificial Sequence
  Synthetic
caugucagagccaggcucugccuggaggaucc

SEQ ID NO: 6913 - RNA, 32 nt, Artificial Sequence
  Synthetic
augucagagccaggcucugccuggaggauccc

SEQ ID NO: 6914 - RNA, 32 nt, Artificial Sequence
  Synthetic
ugucagagccaggcucugccuggaggaucccu

SEQ ID NO: 6915 - RNA, 32 nt, Artificial Sequence
  Synthetic
gucagagccaggcucugccuggaggaucccuc

SEQ ID NO: 6916 - RNA, 32 nt, Artificial Sequence
  Synthetic
ucagagccaggcucugccuggaggaucccucc

SEQ ID NO: 6917 - RNA, 32 nt, Artificial Sequence
  Synthetic
cagagccaggcucugccuggaggaucccucca

SEQ ID NO: 6918 - RNA, 32 nt, Artificial Sequence
  Synthetic
agagccaggcucugccuggaggaucccuccau

SEQ ID NO: 6919 - RNA, 32 nt, Artificial Sequence
  Synthetic
gagccaggcucugccuggaggaucccuccauc

SEQ ID NO: 6920 - RNA, 32 nt, Artificial Sequence
  Synthetic
agccaggcucugccuggaggaucccuccaucc

SEQ ID NO: 6921 - RNA, 32 nt, Artificial Sequence
  Synthetic
gccaggcucugccuggaggaucccuccauccg

SEQ ID NO: 6922 - RNA, 32 nt, Artificial Sequence
  Synthetic
ccaggcucugccuggaggaucccuccauccgg

SEQ ID NO: 6923 - RNA, 32 nt, Artificial Sequence
  Synthetic
caggcucugccuggaggaucccuccauccggc

SEQ ID NO: 6924 - RNA, 32 nt, Artificial Sequence
  Synthetic
aggcucugccuggaggaucccuccauccggcu

SEQ ID NO: 6925 - RNA, 32 nt, Artificial Sequence
  Synthetic
ggcucugccuggaggaucccuccauccggcuc

SEQ ID NO: 6926 - RNA, 32 nt, Artificial Sequence
  Synthetic
gcucugccuggaggaucccuccauccggcucc

SEQ ID NO: 6927 - RNA, 32 nt, Artificial Sequence
  Synthetic
cucugccuggaggaucccuccauccggcuccu

SEQ ID NO: 6928 - RNA, 32 nt, Artificial Sequence
  Synthetic
ucugccuggaggaucccuccauccggcuccug

SEQ ID NO: 6929 - RNA, 32 nt, Artificial Sequence
  Synthetic
cugccuggaggaucccuccauccggcuccugu

SEQ ID NO: 6930 - RNA, 32 nt, Artificial Sequence
  Synthetic
ugccuggaggaucccuccauccggcuccuguc

SEQ ID NO: 6931 - RNA, 32 nt, Artificial Sequence
  Synthetic
gccuggaggaucccuccauccggcuccuguca

SEQ ID NO: 6932 - RNA, 32 nt, Artificial Sequence
  Synthetic
ccuggaggaucccuccauccggcuccugucau

SEQ ID NO: 6933 - RNA, 32 nt, Artificial Sequence
  Synthetic
cuggaggaucccuccauccggcuccugucauc

SEQ ID NO: 6934 - RNA, 32 nt, Artificial Sequence
  Synthetic
uggaggaucccuccauccggcuccugucaucc

SEQ ID NO: 6935 - RNA, 32 nt, Artificial Sequence
  Synthetic
ggaggaucccuccauccggcuccugucauccc

SEQ ID NO: 6936 - RNA, 32 nt, Artificial Sequence
  Synthetic
gaggaucccuccauccggcuccugucaucccc

SEQ ID NO: 6937 - RNA, 32 nt, Artificial Sequence
  Synthetic
aggaucccuccauccggcuccugucauccccu

SEQ ID NO: 6938 - RNA, 32 nt, Artificial Sequence
  Synthetic
ggaucccuccauccggcuccugucauccccua

SEQ ID NO: 6939 - RNA, 32 nt, Artificial Sequence
  Synthetic
gaucccuccauccggcuccugucauccccuac

SEQ ID NO: 6940 - RNA, 32 nt, Artificial Sequence
  Synthetic
aucccuccauccggcuccugucauccccuaca

SEQ ID NO: 6941 - RNA, 32 nt, Artificial Sequence
  Synthetic
ucccuccauccggcuccugucauccccuacac

SEQ ID NO: 6942 - RNA, 32 nt, Artificial Sequence
  Synthetic
cccuccauccggcuccugucauccccuacacu

SEQ ID NO: 6943 - RNA, 32 nt, Artificial Sequence
  Synthetic
ccuccauccggcuccugucauccccuacacuu

SEQ ID NO: 6944 - RNA, 32 nt, Artificial Sequence
  Synthetic
cuccauccggcuccugucauccccuacacuuu

SEQ ID NO: 6945 - RNA, 32 nt, Artificial Sequence
  Synthetic
uccauccggcuccugucauccccuacacuuug

SEQ ID NO: 6946 - RNA, 32 nt, Artificial Sequence
  Synthetic
ccauccggcuccugucauccccuacacuuugg

SEQ ID NO: 6947 - RNA, 32 nt, Artificial Sequence
  Synthetic
cauccggcuccugucauccccuacacuuuggc

SEQ ID NO: 6948 - RNA, 32 nt, Artificial Sequence
  Synthetic
auccggcuccugucauccccuacacuuuggcc

SEQ ID NO: 6949 - RNA, 32 nt, Artificial Sequence
  Synthetic
uccggcuccugucauccccuacacuuuggcca

SEQ ID NO: 6950 - RNA, 32 nt, Artificial Sequence
  Synthetic
ccggcuccugucauccccuacacuuuggccaa

SEQ ID NO: 6951 - RNA, 32 nt, Artificial Sequence
  Synthetic
cggcuccugucauccccuacacuuuggccaag

SEQ ID NO: 6952 - RNA, 32 nt, Artificial Sequence
  Synthetic
ggcuccugucauccccuacacuuuggccaagc

SEQ ID NO: 6953 - RNA, 32 nt, Artificial Sequence
  Synthetic
gcuccugucauccccuacacuuuggccaagca

SEQ ID NO: 6954 - RNA, 32 nt, Artificial Sequence
  Synthetic
cuccugucauccccuacacuuuggccaagcaa

SEQ ID NO: 6955 - RNA, 32 nt, Artificial Sequence
  Synthetic
uccugucauccccuacacuuuggccaagcaag

SEQ ID NO: 6956 - RNA, 32 nt, Artificial Sequence
  Synthetic
ccugucauccccuacacuuuggccaagcaaga

SEQ ID NO: 6957 - RNA, 32 nt, Artificial Sequence
  Synthetic
cugucauccccuacacuuuggccaagcaagag

SEQ ID NO: 6958 - RNA, 32 nt, Artificial Sequence
  Synthetic
ugucauccccuacacuuuggccaagcaagagg

SEQ ID NO: 6959 - RNA, 32 nt, Artificial Sequence
  Synthetic
gucauccccuacacuuuggccaagcaagaggu

SEQ ID NO: 6960 - RNA, 32 nt, Artificial Sequence
  Synthetic
ucauccccuacacuuuggccaagcaagaggug

SEQ ID NO: 6961 - RNA, 32 nt, Artificial Sequence
  Synthetic
cauccccuacacuuuggccaagcaagaggugg

SEQ ID NO: 6962 - RNA, 32 nt, Artificial Sequence
  Synthetic
auccccuacacuuuggccaagcaagagguggu

SEQ ID NO: 6963 - RNA, 32 nt, Artificial Sequence
  Synthetic
uccccuacacuuuggccaagcaagagguggua

SEQ ID NO: 6964 - RNA, 32 nt, Artificial Sequence
  Synthetic
ccccuacacuuuggccaagcaagaggugguag

SEQ ID NO: 6965 - RNA, 32 nt, Artificial Sequence
  Synthetic
cccuacacuuuggccaagcaagaggugguaga

SEQ ID NO: 6966 - RNA, 32 nt, Artificial Sequence
  Synthetic
ccuacacuuuggccaagcaagaggugguagaa

SEQ ID NO: 6967 - RNA, 32 nt, Artificial Sequence
  Synthetic
cuacacuuuggccaagcaagaggugguagaac

SEQ ID NO: 6968 - RNA, 32 nt, Artificial Sequence
  Synthetic
uacacuuuggccaagcaagaggugguagaacc

SEQ ID NO: 6969 - RNA, 32 nt, Artificial Sequence
  Synthetic
acacuuuggccaagcaagaggugguagaacca

SEQ ID NO: 6970 - RNA, 32 nt, Artificial Sequence
  Synthetic
cacuuuggccaagcaagaggugguagaaccac

SEQ ID NO: 6971 - RNA, 32 nt, Artificial Sequence
  Synthetic
acuuuggccaagcaagaggugguagaaccacu

SEQ ID NO: 6972 - RNA, 32 nt, Artificial Sequence
  Synthetic
cuuuggccaagcaagaggugguagaaccacuu

SEQ ID NO: 6973 - RNA, 32 nt, Artificial Sequence
  Synthetic
uuuggccaagcaagaggugguagaaccacuug

SEQ ID NO: 6974 - RNA, 32 nt, Artificial Sequence
  Synthetic
uuggccaagcaagaggugguagaaccacuugg

SEQ ID NO: 6975 - RNA, 32 nt, Artificial Sequence
  Synthetic
uggccaagcaagaggugguagaaccacuuggc

SEQ ID NO: 6976 - RNA, 32 nt, Artificial Sequence
  Synthetic
ggccaagcaagaggugguagaaccacuuggcu

SEQ ID NO: 6977 - RNA, 32 nt, Artificial Sequence
  Synthetic
gccaagcaagaggugguagaaccacuuggcug

SEQ ID NO: 6978 - RNA, 32 nt, Artificial Sequence
  Synthetic
ccaagcaagaggugguagaaccacuuggcugc

SEQ ID NO: 6979 - RNA, 32 nt, Artificial Sequence
  Synthetic
caagcaagaggugguagaaccacuuggcugcu

SEQ ID NO: 6980 - RNA, 32 nt, Artificial Sequence
  Synthetic
aagcaagaggugguagaaccacuuggcugcuc

SEQ ID NO: 6981 - RNA, 32 nt, Artificial Sequence
  Synthetic
agcaagaggugguagaaccacuuggcugcuca

SEQ ID NO: 6982 - RNA, 32 nt, Artificial Sequence
  Synthetic
gcaagaggugguagaaccacuuggcugcucau

SEQ ID NO: 6983 - RNA, 32 nt, Artificial Sequence
  Synthetic
caagaggugguagaaccacuuggcugcucauu

SEQ ID NO: 6984 - RNA, 32 nt, Artificial Sequence
  Synthetic
aagaggugguagaaccacuuggcugcucauuc

SEQ ID NO: 6985 - RNA, 32 nt, Artificial Sequence
  Synthetic
agaggugguagaaccacuuggcugcucauucc

SEQ ID NO: 6986 - RNA, 32 nt, Artificial Sequence
  Synthetic
gaggugguagaaccacuuggcugcucauuccu

SEQ ID NO: 6987 - RNA, 32 nt, Artificial Sequence
  Synthetic
aggugguagaaccacuuggcugcucauuccuu

SEQ ID NO: 6988 - RNA, 32 nt, Artificial Sequence
  Synthetic
ggugguagaaccacuuggcugcucauuccuuc

SEQ ID NO: 6989 - RNA, 32 nt, Artificial Sequence
  Synthetic
gugguagaaccacuuggcugcucauuccuucu

SEQ ID NO: 6990 - RNA, 32 nt, Artificial Sequence
  Synthetic
ugguagaaccacuuggcugcucauuccuucug

SEQ ID NO: 6991 - RNA, 32 nt, Artificial Sequence
  Synthetic
gguagaaccacuuggcugcucauuccuucugg

SEQ ID NO: 6992 - RNA, 32 nt, Artificial Sequence
  Synthetic
guagaaccacuuggcugcucauuccuucugga

SEQ ID NO: 6993 - RNA, 32 nt, Artificial Sequence
  Synthetic
uagaaccacuuggcugcucauuccuucuggag

SEQ ID NO: 6994 - RNA, 32 nt, Artificial Sequence
  Synthetic
agaaccacuuggcugcucauuccuucuggagg

SEQ ID NO: 6995 - RNA, 32 nt, Artificial Sequence
  Synthetic
gaaccacuuggcugcucauuccuucuggagga

SEQ ID NO: 6996 - RNA, 32 nt, Artificial Sequence
  Synthetic
aaccacuuggcugcucauuccuucuggaggac

SEQ ID NO: 6997 - RNA, 32 nt, Artificial Sequence
  Synthetic
accacuuggcugcucauuccuucuggaggaca

SEQ ID NO: 6998 - RNA, 32 nt, Artificial Sequence
  Synthetic
ccacuuggcugcucauuccuucuggaggacac

SEQ ID NO: 6999 - RNA, 32 nt, Artificial Sequence
  Synthetic
cacuuggcugcucauuccuucuggaggacaca

SEQ ID NO: 7000 - RNA, 32 nt, Artificial Sequence
  Synthetic
acuuggcugcucauuccuucuggaggacacac

SEQ ID NO: 7001 - RNA, 32 nt, Artificial Sequence
  Synthetic
cuuggcugcucauuccuucuggaggacacaca

SEQ ID NO: 7002 - RNA, 32 nt, Artificial Sequence
  Synthetic
uuggcugcucauuccuucuggaggacacacag

SEQ ID NO: 7003 - RNA, 32 nt, Artificial Sequence
  Synthetic
uggcugcucauuccuucuggaggacacacagu

SEQ ID NO: 7004 - RNA, 32 nt, Artificial Sequence
  Synthetic
ggcugcucauuccuucuggaggacacacaguc

SEQ ID NO: 7005 - RNA, 32 nt, Artificial Sequence
  Synthetic
gcugcucauuccuucuggaggacacacagucu

SEQ ID NO: 7006 - RNA, 32 nt, Artificial Sequence
  Synthetic
cugcucauuccuucuggaggacacacagucuc

SEQ ID NO: 7007 - RNA, 32 nt, Artificial Sequence
  Synthetic
ugcucauuccuucuggaggacacacagucuca

SEQ ID NO: 7008 - RNA, 32 nt, Artificial Sequence
  Synthetic
gcucauuccuucuggaggacacacagucucag

SEQ ID NO: 7009 - RNA, 32 nt, Artificial Sequence
  Synthetic
cucauuccuucuggaggacacacagucucagu

SEQ ID NO: 7010 - RNA, 32 nt, Artificial Sequence
  Synthetic
ucauuccuucuggaggacacacagucucaguc

SEQ ID NO: 7011 - RNA, 32 nt, Artificial Sequence
  Synthetic
cauuccuucuggaggacacacagucucagucc

SEQ ID NO: 7012 - RNA, 32 nt, Artificial Sequence
  Synthetic
auuccuucuggaggacacacagucucagucca

SEQ ID NO: 7013 - RNA, 32 nt, Artificial Sequence
  Synthetic
uuccuucuggaggacacacagucucaguccag

SEQ ID NO: 7014 - RNA, 32 nt, Artificial Sequence
  Synthetic
uccuucuggaggacacacagucucaguccaga

SEQ ID NO: 7015 - RNA, 32 nt, Artificial Sequence
  Synthetic
ccuucuggaggacacacagucucaguccagau

SEQ ID NO: 7016 - RNA, 32 nt, Artificial Sequence
  Synthetic
cuucuggaggacacacagucucaguccagaug

SEQ ID NO: 7017 - RNA, 32 nt, Artificial Sequence
  Synthetic
uucuggaggacacacagucucaguccagaugc

SEQ ID NO: 7018 - RNA, 32 nt, Artificial Sequence
  Synthetic
ucuggaggacacacagucucaguccagaugcc

SEQ ID NO: 7019 - RNA, 32 nt, Artificial Sequence
  Synthetic
cuggaggacacacagucucaguccagaugccu

SEQ ID NO: 7020 - RNA, 32 nt, Artificial Sequence
  Synthetic
uggaggacacacagucucaguccagaugccuu

SEQ ID NO: 7021 - RNA, 32 nt, Artificial Sequence
  Synthetic
ggaggacacacagucucaguccagaugccuuc

SEQ ID NO: 7022 - RNA, 32 nt, Artificial Sequence
  Synthetic
gaggacacacagucucaguccagaugccuucc

SEQ ID NO: 7023 - RNA, 32 nt, Artificial Sequence
  Synthetic
aggacacacagucucaguccagaugccuuccu

SEQ ID NO: 7024 - RNA, 32 nt, Artificial Sequence
  Synthetic
ggacacacagucucaguccagaugccuuccug

SEQ ID NO: 7025 - RNA, 32 nt, Artificial Sequence
  Synthetic
gacacacagucucaguccagaugccuuccugu

SEQ ID NO: 7026 - RNA, 32 nt, Artificial Sequence
  Synthetic
acacacagucucaguccagaugccuuccuguc

SEQ ID NO: 7027 - RNA, 32 nt, Artificial Sequence
  Synthetic
cacacagucucaguccagaugccuuccugucu

SEQ ID NO: 7028 - RNA, 32 nt, Artificial Sequence
  Synthetic
acacagucucaguccagaugccuuccugucuu

SEQ ID NO: 7029 - RNA, 32 nt, Artificial Sequence
  Synthetic
cacagucucaguccagaugccuuccugucuuu

SEQ ID NO: 7030 - RNA, 32 nt, Artificial Sequence
  Synthetic
acagucucaguccagaugccuuccugucuuuc

SEQ ID NO: 7031 - RNA, 32 nt, Artificial Sequence
  Synthetic
cagucucaguccagaugccuuccugucuuucu

SEQ ID NO: 7032 - RNA, 32 nt, Artificial Sequence
  Synthetic
agucucaguccagaugccuuccugucuuucug

SEQ ID NO: 7033 - RNA, 32 nt, Artificial Sequence
  Synthetic
gucucaguccagaugccuuccugucuuucugg

SEQ ID NO: 7034 - RNA, 32 nt, Artificial Sequence
  Synthetic
ucucaguccagaugccuuccugucuuucuggc

SEQ ID NO: 7035 - RNA, 32 nt, Artificial Sequence
  Synthetic
cucaguccagaugccuuccugucuuucuggcc

SEQ ID NO: 7036 - RNA, 32 nt, Artificial Sequence
  Synthetic
ucaguccagaugccuuccugucuuucuggccc

SEQ ID NO: 7037 - RNA, 32 nt, Artificial Sequence
  Synthetic
caguccagaugccuuccugucuuucuggcccu

SEQ ID NO: 7038 - RNA, 32 nt, Artificial Sequence
  Synthetic
aguccagaugccuuccugucuuucuggcccuu

SEQ ID NO: 7039 - RNA, 32 nt, Artificial Sequence
  Synthetic
guccagaugccuuccugucuuucuggcccuuu

SEQ ID NO: 7040 - RNA, 32 nt, Artificial Sequence
  Synthetic
uccagaugccuuccugucuuucuggcccuuuc

SEQ ID NO: 7041 - RNA, 32 nt, Artificial Sequence
  Synthetic
ccagaugccuuccugucuuucuggcccuuucu

SEQ ID NO: 7042 - RNA, 32 nt, Artificial Sequence
  Synthetic
cagaugccuuccugucuuucuggcccuuucug

SEQ ID NO: 7043 - RNA, 32 nt, Artificial Sequence
  Synthetic
agaugccuuccugucuuucuggcccuuucugg

SEQ ID NO: 7044 - RNA, 32 nt, Artificial Sequence
  Synthetic
gaugccuuccugucuuucuggcccuuucugga

SEQ ID NO: 7045 - RNA, 32 nt, Artificial Sequence
  Synthetic
augccuuccugucuuucuggcccuuucuggac

SEQ ID NO: 7046 - RNA, 32 nt, Artificial Sequence
  Synthetic
ugccuuccugucuuucuggcccuuucuggacc

SEQ ID NO: 7047 - RNA, 32 nt, Artificial Sequence
  Synthetic
gccuuccugucuuucuggcccuuucuggacca

SEQ ID NO: 7048 - RNA, 32 nt, Artificial Sequence
  Synthetic
ccuuccugucuuucuggcccuuucuggaccag

SEQ ID NO: 7049 - RNA, 32 nt, Artificial Sequence
  Synthetic
cuuccugucuuucuggcccuuucuggaccaga

SEQ ID NO: 7050 - RNA, 32 nt, Artificial Sequence
  Synthetic
uuccugucuuucuggcccuuucuggaccagau

SEQ ID NO: 7051 - RNA, 32 nt, Artificial Sequence
  Synthetic
uccugucuuucuggcccuuucuggaccagauc

SEQ ID NO: 7052 - RNA, 32 nt, Artificial Sequence
  Synthetic
ccugucuuucuggcccuuucuggaccagaucc

SEQ ID NO: 7053 - RNA, 32 nt, Artificial Sequence
  Synthetic
cugucuuucuggcccuuucuggaccagauccu

SEQ ID NO: 7054 - RNA, 32 nt, Artificial Sequence
  Synthetic
ugucuuucuggcccuuucuggaccagauccua

SEQ ID NO: 7055 - RNA, 32 nt, Artificial Sequence
  Synthetic
gucuuucuggcccuuucuggaccagauccuac

SEQ ID NO: 7056 - RNA, 32 nt, Artificial Sequence
  Synthetic
ucuuucuggcccuuucuggaccagauccuacu

SEQ ID NO: 7057 - RNA, 32 nt, Artificial Sequence
  Synthetic
cuuucuggcccuuucuggaccagauccuacuc

SEQ ID NO: 7058 - RNA, 32 nt, Artificial Sequence
  Synthetic
uuucuggcccuuucuggaccagauccuacucu

SEQ ID NO: 7059 - RNA, 32 nt, Artificial Sequence
  Synthetic
uucuggcccuuucuggaccagauccuacucuu

SEQ ID NO: 7060 - RNA, 32 nt, Artificial Sequence
  Synthetic
ucuggcccuuucuggaccagauccuacucuuc

SEQ ID NO: 7061 - RNA, 32 nt, Artificial Sequence
  Synthetic
cuggcccuuucuggaccagauccuacucuucc

SEQ ID NO: 7062 - RNA, 32 nt, Artificial Sequence
  Synthetic
uggcccuuucuggaccagauccuacucuuccu

SEQ ID NO: 7063 - RNA, 32 nt, Artificial Sequence
  Synthetic
ggcccuuucuggaccagauccuacucuuccuu

SEQ ID NO: 7064 - RNA, 32 nt, Artificial Sequence
  Synthetic
gcccuuucuggaccagauccuacucuuccuuu

SEQ ID NO: 7065 - RNA, 32 nt, Artificial Sequence
  Synthetic
cccuuucuggaccagauccuacucuuccuuuc

SEQ ID NO: 7066 - RNA, 32 nt, Artificial Sequence
  Synthetic
ccuuucuggaccagauccuacucuuccuuucu

SEQ ID NO: 7067 - RNA, 32 nt, Artificial Sequence
  Synthetic
cuuucuggaccagauccuacucuuccuuucua

SEQ ID NO: 7068 - RNA, 32 nt, Artificial Sequence
  Synthetic
uuucuggaccagauccuacucuuccuuucuaa

SEQ ID NO: 7069 - RNA, 32 nt, Artificial Sequence
  Synthetic
uucuggaccagauccuacucuuccuuucuaaa

SEQ ID NO: 7070 - RNA, 32 nt, Artificial Sequence
  Synthetic
ucuggaccagauccuacucuuccuuucuaaau

SEQ ID NO: 7071 - RNA, 32 nt, Artificial Sequence
  Synthetic
cuggaccagauccuacucuuccuuucuaaauc

SEQ ID NO: 7072 - RNA, 32 nt, Artificial Sequence
  Synthetic
uggaccagauccuacucuuccuuucuaaaucu

SEQ ID NO: 7073 - RNA, 32 nt, Artificial Sequence
  Synthetic
ggaccagauccuacucuuccuuucuaaaucug

SEQ ID NO: 7074 - RNA, 32 nt, Artificial Sequence
  Synthetic
gaccagauccuacucuuccuuucuaaaucuga

SEQ ID NO: 7075 - RNA, 32 nt, Artificial Sequence
  Synthetic
accagauccuacucuuccuuucuaaaucugag

SEQ ID NO: 7076 - RNA, 32 nt, Artificial Sequence
  Synthetic
ccagauccuacucuuccuuucuaaaucugaga

SEQ ID NO: 7077 - RNA, 32 nt, Artificial Sequence
  Synthetic
cagauccuacucuuccuuucuaaaucugagau

SEQ ID NO: 7078 - RNA, 32 nt, Artificial Sequence
  Synthetic
agauccuacucuuccuuucuaaaucugagauc

SEQ ID NO: 7079 - RNA, 32 nt, Artificial Sequence
  Synthetic
gauccuacucuuccuuucuaaaucugagaucu

SEQ ID NO: 7080 - RNA, 32 nt, Artificial Sequence
  Synthetic
auccuacucuuccuuucuaaaucugagaucuc

SEQ ID NO: 7081 - RNA, 32 nt, Artificial Sequence
  Synthetic
uccuacucuuccuuucuaaaucugagaucucc

SEQ ID NO: 7082 - RNA, 32 nt, Artificial Sequence
  Synthetic
ccuacucuuccuuucuaaaucugagaucuccc

SEQ ID NO: 7083 - RNA, 32 nt, Artificial Sequence
  Synthetic
cuacucuuccuuucuaaaucugagaucucccu

SEQ ID NO: 7084 - RNA, 32 nt, Artificial Sequence
  Synthetic
uacucuuccuuucuaaaucugagaucucccuc

SEQ ID NO: 7085 - RNA, 32 nt, Artificial Sequence
  Synthetic
acucuuccuuucuaaaucugagaucucccucc

SEQ ID NO: 7086 - RNA, 32 nt, Artificial Sequence
  Synthetic
cucuuccuuucuaaaucugagaucucccucca

SEQ ID NO: 7087 - RNA, 32 nt, Artificial Sequence
  Synthetic
ucuuccuuucuaaaucugagaucucccuccag

SEQ ID NO: 7088 - RNA, 32 nt, Artificial Sequence
  Synthetic
cuuccuuucuaaaucugagaucucccuccagg

SEQ ID NO: 7089 - RNA, 32 nt, Artificial Sequence
  Synthetic
uuccuuucuaaaucugagaucucccuccaggg

SEQ ID NO: 7090 - RNA, 32 nt, Artificial Sequence
  Synthetic
uccuuucuaaaucugagaucucccuccaggga

SEQ ID NO: 7091 - RNA, 32 nt, Artificial Sequence
  Synthetic
ccuuucuaaaucugagaucucccuccagggaa

SEQ ID NO: 7092 - RNA, 32 nt, Artificial Sequence
  Synthetic
cuuucuaaaucugagaucucccuccagggaau

SEQ ID NO: 7093 - RNA, 32 nt, Artificial Sequence
  Synthetic
uuucuaaaucugagaucucccuccagggaauc

SEQ ID NO: 7094 - RNA, 32 nt, Artificial Sequence
  Synthetic
uucuaaaucugagaucucccuccagggaaucc

SEQ ID NO: 7095 - RNA, 32 nt, Artificial Sequence
  Synthetic
ucuaaaucugagaucucccuccagggaauccg

SEQ ID NO: 7096 - RNA, 32 nt, Artificial Sequence
  Synthetic
cuaaaucugagaucucccuccagggaauccgc

SEQ ID NO: 7097 - RNA, 32 nt, Artificial Sequence
  Synthetic
uaaaucugagaucucccuccagggaauccgcc

SEQ ID NO: 7098 - RNA, 32 nt, Artificial Sequence
  Synthetic
aaaucugagaucucccuccagggaauccgccu

SEQ ID NO: 7099 - RNA, 32 nt, Artificial Sequence
  Synthetic
aaucugagaucucccuccagggaauccgccug

SEQ ID NO: 7100 - RNA, 32 nt, Artificial Sequence
  Synthetic
aucugagaucucccuccagggaauccgccugc

SEQ ID NO: 7101 - RNA, 32 nt, Artificial Sequence
  Synthetic
ucugagaucucccuccagggaauccgccugca

SEQ ID NO: 7102 - RNA, 32 nt, Artificial Sequence
  Synthetic
cugagaucucccuccagggaauccgccugcag

SEQ ID NO: 7103 - RNA, 32 nt, Artificial Sequence
  Synthetic
ugagaucucccuccagggaauccgccugcaga

SEQ ID NO: 7104 - RNA, 32 nt, Artificial Sequence
  Synthetic
gagaucucccuccagggaauccgccugcagag

SEQ ID NO: 7105 - RNA, 32 nt, Artificial Sequence
  Synthetic
agaucucccuccagggaauccgccugcagagg

SEQ ID NO: 7106 - RNA, 32 nt, Artificial Sequence
  Synthetic
gaucucccuccagggaauccgccugcagagga

SEQ ID NO: 7107 - RNA, 32 nt, Artificial Sequence
  Synthetic
aucucccuccagggaauccgccugcagaggac

SEQ ID NO: 7108 - RNA, 32 nt, Artificial Sequence
  Synthetic
ucucccuccagggaauccgccugcagaggaca

SEQ ID NO: 7109 - RNA, 32 nt, Artificial Sequence
  Synthetic
cucccuccagggaauccgccugcagaggacag

SEQ ID NO: 7110 - RNA, 32 nt, Artificial Sequence
  Synthetic
ucccuccagggaauccgccugcagaggacaga

SEQ ID NO: 7111 - RNA, 32 nt, Artificial Sequence
  Synthetic
cccuccagggaauccgccugcagaggacagag

SEQ ID NO: 7112 - RNA, 32 nt, Artificial Sequence
  Synthetic
ccuccagggaauccgccugcagaggacagagc

SEQ ID NO: 7113 - RNA, 32 nt, Artificial Sequence
  Synthetic
cuccagggaauccgccugcagaggacagagcu

SEQ ID NO: 7114 - RNA, 32 nt, Artificial Sequence
  Synthetic
uccagggaauccgccugcagaggacagagcug

SEQ ID NO: 7115 - RNA, 32 nt, Artificial Sequence
  Synthetic
ccagggaauccgccugcagaggacagagcugg

SEQ ID NO: 7116 - RNA, 32 nt, Artificial Sequence
  Synthetic
cagggaauccgccugcagaggacagagcuggc

SEQ ID NO: 7117 - RNA, 32 nt, Artificial Sequence
  Synthetic
agggaauccgccugcagaggacagagcuggcu

SEQ ID NO: 7118 - RNA, 32 nt, Artificial Sequence
  Synthetic
gggaauccgccugcagaggacagagcuggcug

SEQ ID NO: 7119 - RNA, 32 nt, Artificial Sequence
  Synthetic
ggaauccgccugcagaggacagagcuggcugu

SEQ ID NO: 7120 - RNA, 32 nt, Artificial Sequence
  Synthetic
gaauccgccugcagaggacagagcuggcuguc

SEQ ID NO: 7121 - RNA, 32 nt, Artificial Sequence
  Synthetic
aauccgccugcagaggacagagcuggcugucu

SEQ ID NO: 7122 - RNA, 32 nt, Artificial Sequence
  Synthetic
auccgccugcagaggacagagcuggcugucuu

SEQ ID NO: 7123 - RNA, 32 nt, Artificial Sequence
  Synthetic
uccgccugcagaggacagagcuggcugucuuc

SEQ ID NO: 7124 - RNA, 32 nt, Artificial Sequence
  Synthetic
ccgccugcagaggacagagcuggcugucuucc

SEQ ID NO: 7125 - RNA, 32 nt, Artificial Sequence
  Synthetic
cgccugcagaggacagagcuggcugucuuccc

SEQ ID NO: 7126 - RNA, 32 nt, Artificial Sequence
  Synthetic
gccugcagaggacagagcuggcugucuucccc

SEQ ID NO: 7127 - RNA, 32 nt, Artificial Sequence
  Synthetic
ccugcagaggacagagcuggcugucuuccccc

SEQ ID NO: 7128 - RNA, 32 nt, Artificial Sequence
  Synthetic
cugcagaggacagagcuggcugucuuccccca

SEQ ID NO: 7129 - RNA, 32 nt, Artificial Sequence
  Synthetic
ugcagaggacagagcuggcugucuucccccac

SEQ ID NO: 7130 - RNA, 32 nt, Artificial Sequence
  Synthetic
gcagaggacagagcuggcugucuucccccacc

SEQ ID NO: 7131 - RNA, 32 nt, Artificial Sequence
  Synthetic
cagaggacagagcuggcugucuucccccaccc

SEQ ID NO: 7132 - RNA, 32 nt, Artificial Sequence
  Synthetic
agaggacagagcuggcugucuucccccacccc

SEQ ID NO: 7133 - RNA, 32 nt, Artificial Sequence
  Synthetic
gaggacagagcuggcugucuucccccaccccu

SEQ ID NO: 7134 - RNA, 32 nt, Artificial Sequence
  Synthetic
aggacagagcuggcugucuucccccaccccua

SEQ ID NO: 7135 - RNA, 32 nt, Artificial Sequence
  Synthetic
ggacagagcuggcugucuucccccaccccuaa

SEQ ID NO: 7136 - RNA, 32 nt, Artificial Sequence
  Synthetic
gacagagcuggcugucuucccccaccccuaac

SEQ ID NO: 7137 - RNA, 32 nt, Artificial Sequence
  Synthetic
acagagcuggcugucuucccccaccccuaacc

SEQ ID NO: 7138 - RNA, 32 nt, Artificial Sequence
  Synthetic
cagagcuggcugucuucccccaccccuaaccu

SEQ ID NO: 7139 - RNA, 32 nt, Artificial Sequence
  Synthetic
agagcuggcugucuucccccaccccuaaccug

SEQ ID NO: 7140 - RNA, 32 nt, Artificial Sequence
  Synthetic
gagcuggcugucuucccccaccccuaaccugg

SEQ ID NO: 7141 - RNA, 32 nt, Artificial Sequence
  Synthetic
agcuggcugucuucccccaccccuaaccuggc

SEQ ID NO: 7142 - RNA, 32 nt, Artificial Sequence
  Synthetic
gcuggcugucuucccccaccccuaaccuggcu

SEQ ID NO: 7143 - RNA, 32 nt, Artificial Sequence
  Synthetic
cuggcugucuucccccaccccuaaccuggcuu

SEQ ID NO: 7144 - RNA, 32 nt, Artificial Sequence
  Synthetic
uggcugucuucccccaccccuaaccuggcuua

SEQ ID NO: 7145 - RNA, 32 nt, Artificial Sequence
  Synthetic
ggcugucuucccccaccccuaaccuggcuuau

SEQ ID NO: 7146 - RNA, 32 nt, Artificial Sequence
  Synthetic
gcugucuucccccaccccuaaccuggcuuauu

SEQ ID NO: 7147 - RNA, 32 nt, Artificial Sequence
  Synthetic
cugucuucccccaccccuaaccuggcuuauuc

SEQ ID NO: 7148 - RNA, 32 nt, Artificial Sequence
  Synthetic
ugucuucccccaccccuaaccuggcuuauucc

SEQ ID NO: 7149 - RNA, 32 nt, Artificial Sequence
  Synthetic
gucuucccccaccccuaaccuggcuuauuccc

SEQ ID NO: 7150 - RNA, 32 nt, Artificial Sequence
  Synthetic
ucuucccccaccccuaaccuggcuuauuccca

SEQ ID NO: 7151 - RNA, 32 nt, Artificial Sequence
  Synthetic
cuucccccaccccuaaccuggcuuauucccaa

SEQ ID NO: 7152 - RNA, 32 nt, Artificial Sequence
  Synthetic
uucccccaccccuaaccuggcuuauucccaac

SEQ ID NO: 7153 - RNA, 32 nt, Artificial Sequence
  Synthetic
ucccccaccccuaaccuggcuuauucccaacu

SEQ ID NO: 7154 - RNA, 32 nt, Artificial Sequence
  Synthetic
cccccaccccuaaccuggcuuauucccaacug

SEQ ID NO: 7155 - RNA, 32 nt, Artificial Sequence
  Synthetic
ccccaccccuaaccuggcuuauucccaacugc

SEQ ID NO: 7156 - RNA, 32 nt, Artificial Sequence
  Synthetic
cccaccccuaaccuggcuuauucccaacugcu

SEQ ID NO: 7157 - RNA, 32 nt, Artificial Sequence
  Synthetic
ccaccccuaaccuggcuuauucccaacugcuc

SEQ ID NO: 7158 - RNA, 32 nt, Artificial Sequence
  Synthetic
caccccuaaccuggcuuauucccaacugcucu

SEQ ID NO: 7159 - RNA, 32 nt, Artificial Sequence
  Synthetic
accccuaaccuggcuuauucccaacugcucug

SEQ ID NO: 7160 - RNA, 32 nt, Artificial Sequence
  Synthetic
ccccuaaccuggcuuauucccaacugcucugc

SEQ ID NO: 7161 - RNA, 32 nt, Artificial Sequence
  Synthetic
cccuaaccuggcuuauucccaacugcucugcc

SEQ ID NO: 7162 - RNA, 32 nt, Artificial Sequence
  Synthetic
ccuaaccuggcuuauucccaacugcucugccc

SEQ ID NO: 7163 - RNA, 32 nt, Artificial Sequence
  Synthetic
cuaaccuggcuuauucccaacugcucugccca

SEQ ID NO: 7164 - RNA, 32 nt, Artificial Sequence
  Synthetic
uaaccuggcuuauucccaacugcucugcccac

SEQ ID NO: 7165 - RNA, 32 nt, Artificial Sequence
  Synthetic
aaccuggcuuauucccaacugcucugcccacu

SEQ ID NO: 7166 - RNA, 32 nt, Artificial Sequence
  Synthetic
accuggcuuauucccaacugcucugcccacug

SEQ ID NO: 7167 - RNA, 32 nt, Artificial Sequence
  Synthetic
ccuggcuuauucccaacugcucugcccacugu

SEQ ID NO: 7168 - RNA, 32 nt, Artificial Sequence
  Synthetic
cuggcuuauucccaacugcucugcccacugug

SEQ ID NO: 7169 - RNA, 32 nt, Artificial Sequence
  Synthetic
uggcuuauucccaacugcucugcccacuguga

SEQ ID NO: 7170 - RNA, 32 nt, Artificial Sequence
  Synthetic
ggcuuauucccaacugcucugcccacugugaa

SEQ ID NO: 7171 - RNA, 32 nt, Artificial Sequence
  Synthetic
gcuuauucccaacugcucugcccacugugaaa

SEQ ID NO: 7172 - RNA, 32 nt, Artificial Sequence
  Synthetic
cuuauucccaacugcucugcccacugugaaac

SEQ ID NO: 7173 - RNA, 32 nt, Artificial Sequence
  Synthetic
uuauucccaacugcucugcccacugugaaacc

SEQ ID NO: 7174 - RNA, 32 nt, Artificial Sequence
  Synthetic
uauucccaacugcucugcccacugugaaacca

SEQ ID NO: 7175 - RNA, 32 nt, Artificial Sequence
  Synthetic
auucccaacugcucugcccacugugaaaccac

SEQ ID NO: 7176 - RNA, 32 nt, Artificial Sequence
  Synthetic
uucccaacugcucugcccacugugaaaccacu

SEQ ID NO: 7177 - RNA, 32 nt, Artificial Sequence
  Synthetic
ucccaacugcucugcccacugugaaaccacua

SEQ ID NO: 7178 - RNA, 32 nt, Artificial Sequence
  Synthetic
cccaacugcucugcccacugugaaaccacuag

SEQ ID NO: 7179 - RNA, 32 nt, Artificial Sequence
  Synthetic
ccaacugcucugcccacugugaaaccacuagg

SEQ ID NO: 7180 - RNA, 32 nt, Artificial Sequence
  Synthetic
caacugcucugcccacugugaaaccacuaggu

SEQ ID NO: 7181 - RNA, 32 nt, Artificial Sequence
  Synthetic
aacugcucugcccacugugaaaccacuagguu

SEQ ID NO: 7182 - RNA, 32 nt, Artificial Sequence
  Synthetic
acugcucugcccacugugaaaccacuagguuc

SEQ ID NO: 7183 - RNA, 32 nt, Artificial Sequence
  Synthetic
cugcucugcccacugugaaaccacuagguucu

SEQ ID NO: 7184 - RNA, 32 nt, Artificial Sequence
  Synthetic
ugcucugcccacugugaaaccacuagguucua

SEQ ID NO: 7185 - RNA, 32 nt, Artificial Sequence
  Synthetic
gcucugcccacugugaaaccacuagguucuag

SEQ ID NO: 7186 - RNA, 32 nt, Artificial Sequence
  Synthetic
cucugcccacugugaaaccacuagguucuagg

SEQ ID NO: 7187 - RNA, 32 nt, Artificial Sequence
  Synthetic
ucugcccacugugaaaccacuagguucuaggu

SEQ ID NO: 7188 - RNA, 32 nt, Artificial Sequence
  Synthetic
cugcccacugugaaaccacuagguucuagguc

SEQ ID NO: 7189 - RNA, 32 nt, Artificial Sequence
  Synthetic
ugcccacugugaaaccacuagguucuaggucc

SEQ ID NO: 7190 - RNA, 32 nt, Artificial Sequence
  Synthetic
gcccacugugaaaccacuagguucuagguccu

SEQ ID NO: 7191 - RNA, 32 nt, Artificial Sequence
  Synthetic
cccacugugaaaccacuagguucuagguccug

SEQ ID NO: 7192 - RNA, 32 nt, Artificial Sequence
  Synthetic
ccacugugaaaccacuagguucuagguccugg

SEQ ID NO: 7193 - RNA, 32 nt, Artificial Sequence
  Synthetic
cacugugaaaccacuagguucuagguccuggc

SEQ ID NO: 7194 - RNA, 32 nt, Artificial Sequence
  Synthetic
acugugaaaccacuagguucuagguccuggcu

SEQ ID NO: 7195 - RNA, 32 nt, Artificial Sequence
  Synthetic
cugugaaaccacuagguucuagguccuggcuu

SEQ ID NO: 7196 - RNA, 32 nt, Artificial Sequence
  Synthetic
ugugaaaccacuagguucuagguccuggcuuc

SEQ ID NO: 7197 - RNA, 32 nt, Artificial Sequence
  Synthetic
gugaaaccacuagguucuagguccuggcuucu

SEQ ID NO: 7198 - RNA, 32 nt, Artificial Sequence
  Synthetic
ugaaaccacuagguucuagguccuggcuucua

SEQ ID NO: 7199 - RNA, 32 nt, Artificial Sequence
  Synthetic
gaaaccacuagguucuagguccuggcuucuag

SEQ ID NO: 7200 - RNA, 32 nt, Artificial Sequence
  Synthetic
aaaccacuagguucuagguccuggcuucuaga

SEQ ID NO: 7201 - RNA, 32 nt, Artificial Sequence
  Synthetic
aaccacuagguucuagguccuggcuucuagau

SEQ ID NO: 7202 - RNA, 32 nt, Artificial Sequence
  Synthetic
accacuagguucuagguccuggcuucuagauc

SEQ ID NO: 7203 - RNA, 32 nt, Artificial Sequence
  Synthetic
ccacuagguucuagguccuggcuucuagaucu

SEQ ID NO: 7204 - RNA, 32 nt, Artificial Sequence
  Synthetic
cacuagguucuagguccuggcuucuagaucug

SEQ ID NO: 7205 - RNA, 32 nt, Artificial Sequence
  Synthetic
acuagguucuagguccuggcuucuagaucugg

SEQ ID NO: 7206 - RNA, 32 nt, Artificial Sequence
  Synthetic
cuagguucuagguccuggcuucuagaucugga

SEQ ID NO: 7207 - RNA, 32 nt, Artificial Sequence
  Synthetic
uagguucuagguccuggcuucuagaucuggaa

SEQ ID NO: 7208 - RNA, 32 nt, Artificial Sequence
  Synthetic
agguucuagguccuggcuucuagaucuggaac

SEQ ID NO: 7209 - RNA, 32 nt, Artificial Sequence
  Synthetic
gguucuagguccuggcuucuagaucuggaacc

SEQ ID NO: 7210 - RNA, 32 nt, Artificial Sequence
  Synthetic
guucuagguccuggcuucuagaucuggaaccu

SEQ ID NO: 7211 - RNA, 32 nt, Artificial Sequence
  Synthetic
uucuagguccuggcuucuagaucuggaaccuu

SEQ ID NO: 7212 - RNA, 32 nt, Artificial Sequence
  Synthetic
ucuagguccuggcuucuagaucuggaaccuua

SEQ ID NO: 7213 - RNA, 32 nt, Artificial Sequence
  Synthetic
cuagguccuggcuucuagaucuggaaccuuac

SEQ ID NO: 7214 - RNA, 32 nt, Artificial Sequence
  Synthetic
uagguccuggcuucuagaucuggaaccuuacc

SEQ ID NO: 7215 - RNA, 32 nt, Artificial Sequence
  Synthetic
agguccuggcuucuagaucuggaaccuuacca

SEQ ID NO: 7216 - RNA, 32 nt, Artificial Sequence
  Synthetic
gguccuggcuucuagaucuggaaccuuaccac

SEQ ID NO: 7217 - RNA, 32 nt, Artificial Sequence
  Synthetic
guccuggcuucuagaucuggaaccuuaccacg

SEQ ID NO: 7218 - RNA, 32 nt, Artificial Sequence
  Synthetic
uccuggcuucuagaucuggaaccuuaccacgu

SEQ ID NO: 7219 - RNA, 32 nt, Artificial Sequence
  Synthetic
ccuggcuucuagaucuggaaccuuaccacguu

SEQ ID NO: 7220 - RNA, 32 nt, Artificial Sequence
  Synthetic
cuggcuucuagaucuggaaccuuaccacguua

SEQ ID NO: 7221 - RNA, 32 nt, Artificial Sequence
  Synthetic
uggcuucuagaucuggaaccuuaccacguuac

SEQ ID NO: 7222 - RNA, 32 nt, Artificial Sequence
  Synthetic
ggcuucuagaucuggaaccuuaccacguuacu

SEQ ID NO: 7223 - RNA, 32 nt, Artificial Sequence
  Synthetic
gcuucuagaucuggaaccuuaccacguuacug

SEQ ID NO: 7224 - RNA, 32 nt, Artificial Sequence
  Synthetic
cuucuagaucuggaaccuuaccacguuacugc

SEQ ID NO: 7225 - RNA, 32 nt, Artificial Sequence
  Synthetic
uucuagaucuggaaccuuaccacguuacugca

SEQ ID NO: 7226 - RNA, 32 nt, Artificial Sequence
  Synthetic
ucuagaucuggaaccuuaccacguuacugcau

SEQ ID NO: 7227 - RNA, 32 nt, Artificial Sequence
  Synthetic
cuagaucuggaaccuuaccacguuacugcaua

SEQ ID NO: 7228 - RNA, 32 nt, Artificial Sequence
  Synthetic
uagaucuggaaccuuaccacguuacugcauac

SEQ ID NO: 7229 - RNA, 32 nt, Artificial Sequence
  Synthetic
agaucuggaaccuuaccacguuacugcauacu

SEQ ID NO: 7230 - RNA, 32 nt, Artificial Sequence
  Synthetic
gaucuggaaccuuaccacguuacugcauacug

SEQ ID NO: 7231 - RNA, 32 nt, Artificial Sequence
  Synthetic
aucuggaaccuuaccacguuacugcauacuga

SEQ ID NO: 7232 - RNA, 32 nt, Artificial Sequence
  Synthetic
ucuggaaccuuaccacguuacugcauacugau

SEQ ID NO: 7233 - RNA, 32 nt, Artificial Sequence
  Synthetic
cuggaaccuuaccacguuacugcauacugauc

SEQ ID NO: 7234 - RNA, 32 nt, Artificial Sequence
  Synthetic
uggaaccuuaccacguuacugcauacugaucc

SEQ ID NO: 7235 - RNA, 32 nt, Artificial Sequence
  Synthetic
ggaaccuuaccacguuacugcauacugauccc

SEQ ID NO: 7236 - RNA, 32 nt, Artificial Sequence
  Synthetic
gaaccuuaccacguuacugcauacugaucccu

SEQ ID NO: 7237 - RNA, 32 nt, Artificial Sequence
  Synthetic
aaccuuaccacguuacugcauacugaucccuu

SEQ ID NO: 7238 - RNA, 32 nt, Artificial Sequence
  Synthetic
accuuaccacguuacugcauacugaucccuuu

SEQ ID NO: 7239 - RNA, 32 nt, Artificial Sequence
  Synthetic
ccuuaccacguuacugcauacugaucccuuuc

SEQ ID NO: 7240 - RNA, 32 nt, Artificial Sequence
  Synthetic
cuuaccacguuacugcauacugaucccuuucc

SEQ ID NO: 7241 - RNA, 32 nt, Artificial Sequence
  Synthetic
uuaccacguuacugcauacugaucccuuuccc

SEQ ID NO: 7242 - RNA, 32 nt, Artificial Sequence
  Synthetic
uaccacguuacugcauacugaucccuuuccca

SEQ ID NO: 7243 - RNA, 32 nt, Artificial Sequence
  Synthetic
accacguuacugcauacugaucccuuucccau

SEQ ID NO: 7244 - RNA, 32 nt, Artificial Sequence
  Synthetic
ccacguuacugcauacugaucccuuucccaug

SEQ ID NO: 7245 - RNA, 32 nt, Artificial Sequence
  Synthetic
cacguuacugcauacugaucccuuucccauga

SEQ ID NO: 7246 - RNA, 32 nt, Artificial Sequence
  Synthetic
acguuacugcauacugaucccuuucccaugau

SEQ ID NO: 7247 - RNA, 32 nt, Artificial Sequence
  Synthetic
cguuacugcauacugaucccuuucccaugauc

SEQ ID NO: 7248 - RNA, 32 nt, Artificial Sequence
  Synthetic
guuacugcauacugaucccuuucccaugaucc

SEQ ID NO: 7249 - RNA, 32 nt, Artificial Sequence
  Synthetic
uuacugcauacugaucccuuucccaugaucca

SEQ ID NO: 7250 - RNA, 32 nt, Artificial Sequence
  Synthetic
uacugcauacugaucccuuucccaugauccag

SEQ ID NO: 7251 - RNA, 32 nt, Artificial Sequence
  Synthetic
acugcauacugaucccuuucccaugauccaga

SEQ ID NO: 7252 - RNA, 32 nt, Artificial Sequence
  Synthetic
cugcauacugaucccuuucccaugauccagaa

SEQ ID NO: 7253 - RNA, 32 nt, Artificial Sequence
  Synthetic
ugcauacugaucccuuucccaugauccagaac

SEQ ID NO: 7254 - RNA, 32 nt, Artificial Sequence
  Synthetic
gcauacugaucccuuucccaugauccagaacu

SEQ ID NO: 7255 - RNA, 32 nt, Artificial Sequence
  Synthetic
cauacugaucccuuucccaugauccagaacug

SEQ ID NO: 7256 - RNA, 32 nt, Artificial Sequence
  Synthetic
auacugaucccuuucccaugauccagaacuga

SEQ ID NO: 7257 - RNA, 32 nt, Artificial Sequence
  Synthetic
uacugaucccuuucccaugauccagaacugag

SEQ ID NO: 7258 - RNA, 32 nt, Artificial Sequence
  Synthetic
acugaucccuuucccaugauccagaacugagg

SEQ ID NO: 7259 - RNA, 32 nt, Artificial Sequence
  Synthetic
cugaucccuuucccaugauccagaacugaggu

SEQ ID NO: 7260 - RNA, 32 nt, Artificial Sequence
  Synthetic
ugaucccuuucccaugauccagaacugagguc

SEQ ID NO: 7261 - RNA, 32 nt, Artificial Sequence
  Synthetic
gaucccuuucccaugauccagaacugagguca

SEQ ID NO: 7262 - RNA, 32 nt, Artificial Sequence
  Synthetic
aucccuuucccaugauccagaacugaggucac

SEQ ID NO: 7263 - RNA, 32 nt, Artificial Sequence
  Synthetic
ucccuuucccaugauccagaacugaggucacu

SEQ ID NO: 7264 - RNA, 32 nt, Artificial Sequence
  Synthetic
cccuuucccaugauccagaacugaggucacug

SEQ ID NO: 7265 - RNA, 32 nt, Artificial Sequence
  Synthetic
ccuuucccaugauccagaacugaggucacugg

SEQ ID NO: 7266 - RNA, 32 nt, Artificial Sequence
  Synthetic
cuuucccaugauccagaacugaggucacuggg

SEQ ID NO: 7267 - RNA, 32 nt, Artificial Sequence
  Synthetic
uuucccaugauccagaacugaggucacugggu

SEQ ID NO: 7268 - RNA, 32 nt, Artificial Sequence
  Synthetic
uucccaugauccagaacugaggucacuggguu

SEQ ID NO: 7269 - RNA, 32 nt, Artificial Sequence
  Synthetic
ucccaugauccagaacugaggucacuggguuc

SEQ ID NO: 7270 - RNA, 32 nt, Artificial Sequence
  Synthetic
cccaugauccagaacugaggucacuggguucu

SEQ ID NO: 7271 - RNA, 32 nt, Artificial Sequence
  Synthetic
ccaugauccagaacugaggucacuggguucua

SEQ ID NO: 7272 - RNA, 32 nt, Artificial Sequence
  Synthetic
caugauccagaacugaggucacuggguucuag

SEQ ID NO: 7273 - RNA, 32 nt, Artificial Sequence
  Synthetic
augauccagaacugaggucacuggguucuaga

SEQ ID NO: 7274 - RNA, 32 nt, Artificial Sequence
  Synthetic
ugauccagaacugaggucacuggguucuagaa

SEQ ID NO: 7275 - RNA, 32 nt, Artificial Sequence
  Synthetic
gauccagaacugaggucacuggguucuagaac

SEQ ID NO: 7276 - RNA, 32 nt, Artificial Sequence
  Synthetic
auccagaacugaggucacuggguucuagaacc

SEQ ID NO: 7277 - RNA, 32 nt, Artificial Sequence
  Synthetic
uccagaacugaggucacuggguucuagaaccc

SEQ ID NO: 7278 - RNA, 32 nt, Artificial Sequence
  Synthetic
ccagaacugaggucacuggguucuagaacccc

SEQ ID NO: 7279 - RNA, 32 nt, Artificial Sequence
  Synthetic
cagaacugaggucacuggguucuagaaccccc

SEQ ID NO: 7280 - RNA, 32 nt, Artificial Sequence
  Synthetic
agaacugaggucacuggguucuagaaccccca

SEQ ID NO: 7281 - RNA, 32 nt, Artificial Sequence
  Synthetic
gaacugaggucacuggguucuagaacccccac

SEQ ID NO: 7282 - RNA, 32 nt, Artificial Sequence
  Synthetic
aacugaggucacuggguucuagaacccccaca

SEQ ID NO: 7283 - RNA, 32 nt, Artificial Sequence
  Synthetic
acugaggucacuggguucuagaacccccacau

SEQ ID NO: 7284 - RNA, 32 nt, Artificial Sequence
  Synthetic
cugaggucacuggguucuagaacccccacauu

SEQ ID NO: 7285 - RNA, 32 nt, Artificial Sequence
  Synthetic
ugaggucacuggguucuagaacccccacauuu

SEQ ID NO: 7286 - RNA, 32 nt, Artificial Sequence
  Synthetic
gaggucacuggguucuagaacccccacauuua

SEQ ID NO: 7287 - RNA, 32 nt, Artificial Sequence
  Synthetic
aggucacuggguucuagaacccccacauuuac

SEQ ID NO: 7288 - RNA, 32 nt, Artificial Sequence
  Synthetic
ggucacuggguucuagaacccccacauuuacc

SEQ ID NO: 7289 - RNA, 32 nt, Artificial Sequence
  Synthetic
gucacuggguucuagaacccccacauuuaccu

SEQ ID NO: 7290 - RNA, 32 nt, Artificial Sequence
  Synthetic
ucacuggguucuagaacccccacauuuaccuc

SEQ ID NO: 7291 - RNA, 32 nt, Artificial Sequence
  Synthetic
cacuggguucuagaacccccacauuuaccucg

SEQ ID NO: 7292 - RNA, 32 nt, Artificial Sequence
  Synthetic
acuggguucuagaacccccacauuuaccucga

SEQ ID NO: 7293 - RNA, 32 nt, Artificial Sequence
  Synthetic
cuggguucuagaacccccacauuuaccucgag

SEQ ID NO: 7294 - RNA, 32 nt, Artificial Sequence
  Synthetic
uggguucuagaacccccacauuuaccucgagg

SEQ ID NO: 7295 - RNA, 32 nt, Artificial Sequence
  Synthetic
ggguucuagaacccccacauuuaccucgaggc

SEQ ID NO: 7296 - RNA, 32 nt, Artificial Sequence
  Synthetic
gguucuagaacccccacauuuaccucgaggcu

SEQ ID NO: 7297 - RNA, 32 nt, Artificial Sequence
  Synthetic
guucuagaacccccacauuuaccucgaggcuc

SEQ ID NO: 7298 - RNA, 32 nt, Artificial Sequence
  Synthetic
uucuagaacccccacauuuaccucgaggcucu

SEQ ID NO: 7299 - RNA, 32 nt, Artificial Sequence
  Synthetic
ucuagaacccccacauuuaccucgaggcucuu

SEQ ID NO: 7300 - RNA, 32 nt, Artificial Sequence
  Synthetic
cuagaacccccacauuuaccucgaggcucuuc

SEQ ID NO: 7301 - RNA, 32 nt, Artificial Sequence
  Synthetic
uagaacccccacauuuaccucgaggcucuucc

SEQ ID NO: 7302 - RNA, 32 nt, Artificial Sequence
  Synthetic
agaacccccacauuuaccucgaggcucuucca

SEQ ID NO: 7303 - RNA, 32 nt, Artificial Sequence
  Synthetic
gaacccccacauuuaccucgaggcucuuccau

SEQ ID NO: 7304 - RNA, 32 nt, Artificial Sequence
  Synthetic
aacccccacauuuaccucgaggcucuuccauc

SEQ ID NO: 7305 - RNA, 32 nt, Artificial Sequence
  Synthetic
acccccacauuuaccucgaggcucuuccaucc

SEQ ID NO: 7306 - RNA, 32 nt, Artificial Sequence
  Synthetic
cccccacauuuaccucgaggcucuuccauccc

SEQ ID NO: 7307 - RNA, 32 nt, Artificial Sequence
  Synthetic
ccccacauuuaccucgaggcucuuccaucccc

SEQ ID NO: 7308 - RNA, 32 nt, Artificial Sequence
  Synthetic
cccacauuuaccucgaggcucuuccaucccca

SEQ ID NO: 7309 - RNA, 32 nt, Artificial Sequence
  Synthetic
ccacauuuaccucgaggcucuuccauccccaa

SEQ ID NO: 7310 - RNA, 32 nt, Artificial Sequence
  Synthetic
cacauuuaccucgaggcucuuccauccccaaa

SEQ ID NO: 7311 - RNA, 32 nt, Artificial Sequence
  Synthetic
acauuuaccucgaggcucuuccauccccaaac

SEQ ID NO: 7312 - RNA, 32 nt, Artificial Sequence
  Synthetic
cauuuaccucgaggcucuuccauccccaaacu

SEQ ID NO: 7313 - RNA, 32 nt, Artificial Sequence
  Synthetic
auuuaccucgaggcucuuccauccccaaacug

SEQ ID NO: 7314 - RNA, 32 nt, Artificial Sequence
  Synthetic
uuuaccucgaggcucuuccauccccaaacugu

SEQ ID NO: 7315 - RNA, 32 nt, Artificial Sequence
  Synthetic
uuaccucgaggcucuuccauccccaaacugug

SEQ ID NO: 7316 - RNA, 32 nt, Artificial Sequence
  Synthetic
uaccucgaggcucuuccauccccaaacugugc

SEQ ID NO: 7317 - RNA, 32 nt, Artificial Sequence
  Synthetic
accucgaggcucuuccauccccaaacugugcc

SEQ ID NO: 7318 - RNA, 32 nt, Artificial Sequence
  Synthetic
ccucgaggcucuuccauccccaaacugugccc

SEQ ID NO: 7319 - RNA, 32 nt, Artificial Sequence
  Synthetic
cucgaggcucuuccauccccaaacugugcccu

SEQ ID NO: 7320 - RNA, 32 nt, Artificial Sequence
  Synthetic
ucgaggcucuuccauccccaaacugugcccug

SEQ ID NO: 7321 - RNA, 32 nt, Artificial Sequence
  Synthetic
cgaggcucuuccauccccaaacugugcccugc

SEQ ID NO: 7322 - RNA, 32 nt, Artificial Sequence
  Synthetic
gaggcucuuccauccccaaacugugcccugcc

SEQ ID NO: 7323 - RNA, 32 nt, Artificial Sequence
  Synthetic
aggcucuuccauccccaaacugugcccugccu

SEQ ID NO: 7324 - RNA, 32 nt, Artificial Sequence
  Synthetic
ggcucuuccauccccaaacugugcccugccuu

SEQ ID NO: 7325 - RNA, 32 nt, Artificial Sequence
  Synthetic
gcucuuccauccccaaacugugcccugccuuc

SEQ ID NO: 7326 - RNA, 32 nt, Artificial Sequence
  Synthetic
cucuuccauccccaaacugugcccugccuuca

SEQ ID NO: 7327 - RNA, 32 nt, Artificial Sequence
  Synthetic
ucuuccauccccaaacugugcccugccuucag

SEQ ID NO: 7328 - RNA, 32 nt, Artificial Sequence
  Synthetic
cuuccauccccaaacugugcccugccuucagc

SEQ ID NO: 7329 - RNA, 32 nt, Artificial Sequence
  Synthetic
uuccauccccaaacugugcccugccuucagcu

SEQ ID NO: 7330 - RNA, 32 nt, Artificial Sequence
  Synthetic
uccauccccaaacugugcccugccuucagcuu

SEQ ID NO: 7331 - RNA, 32 nt, Artificial Sequence
  Synthetic
ccauccccaaacugugcccugccuucagcuuu

SEQ ID NO: 7332 - RNA, 32 nt, Artificial Sequence
  Synthetic
cauccccaaacugugcccugccuucagcuuug

SEQ ID NO: 7333 - RNA, 32 nt, Artificial Sequence
  Synthetic
auccccaaacugugcccugccuucagcuuugg

SEQ ID NO: 7334 - RNA, 32 nt, Artificial Sequence
  Synthetic
uccccaaacugugcccugccuucagcuuuggu

SEQ ID NO: 7335 - RNA, 32 nt, Artificial Sequence
  Synthetic
ccccaaacugugcccugccuucagcuuuggug

SEQ ID NO: 7336 - RNA, 32 nt, Artificial Sequence
  Synthetic
cccaaacugugcccugccuucagcuuugguga

SEQ ID NO: 7337 - RNA, 32 nt, Artificial Sequence
  Synthetic
ccaaacugugcccugccuucagcuuuggugaa

SEQ ID NO: 7338 - RNA, 32 nt, Artificial Sequence
  Synthetic
caaacugugcccugccuucagcuuuggugaaa

SEQ ID NO: 7339 - RNA, 32 nt, Artificial Sequence
  Synthetic
aaacugugcccugccuucagcuuuggugaaag

SEQ ID NO: 7340 - RNA, 32 nt, Artificial Sequence
  Synthetic
aacugugcccugccuucagcuuuggugaaagg

SEQ ID NO: 7341 - RNA, 32 nt, Artificial Sequence
  Synthetic
acugugcccugccuucagcuuuggugaaaggg

SEQ ID NO: 7342 - RNA, 32 nt, Artificial Sequence
  Synthetic
cugugcccugccuucagcuuuggugaaaggga

SEQ ID NO: 7343 - RNA, 32 nt, Artificial Sequence
  Synthetic
ugugcccugccuucagcuuuggugaaagggag

SEQ ID NO: 7344 - RNA, 32 nt, Artificial Sequence
  Synthetic
gugcccugccuucagcuuuggugaaagggagg

SEQ ID NO: 7345 - RNA, 32 nt, Artificial Sequence
  Synthetic
ugcccugccuucagcuuuggugaaagggaggg

SEQ ID NO: 7346 - RNA, 32 nt, Artificial Sequence
  Synthetic
gcccugccuucagcuuuggugaaagggagggc

SEQ ID NO: 7347 - RNA, 32 nt, Artificial Sequence
  Synthetic
cccugccuucagcuuuggugaaagggagggcc

SEQ ID NO: 7348 - RNA, 32 nt, Artificial Sequence
  Synthetic
ccugccuucagcuuuggugaaagggagggccc

SEQ ID NO: 7349 - RNA, 32 nt, Artificial Sequence
  Synthetic
cugccuucagcuuuggugaaagggagggcccc

SEQ ID NO: 7350 - RNA, 32 nt, Artificial Sequence
  Synthetic
ugccuucagcuuuggugaaagggagggccccu

SEQ ID NO: 7351 - RNA, 32 nt, Artificial Sequence
  Synthetic
gccuucagcuuuggugaaagggagggccccuc

SEQ ID NO: 7352 - RNA, 32 nt, Artificial Sequence
  Synthetic
ccuucagcuuuggugaaagggagggccccuca

SEQ ID NO: 7353 - RNA, 32 nt, Artificial Sequence
  Synthetic
cuucagcuuuggugaaagggagggccccucau

SEQ ID NO: 7354 - RNA, 32 nt, Artificial Sequence
  Synthetic
uucagcuuuggugaaagggagggccccucaug

SEQ ID NO: 7355 - RNA, 32 nt, Artificial Sequence
  Synthetic
ucagcuuuggugaaagggagggccccucaugu

SEQ ID NO: 7356 - RNA, 32 nt, Artificial Sequence
  Synthetic
cagcuuuggugaaagggagggccccucaugug

SEQ ID NO: 7357 - RNA, 32 nt, Artificial Sequence
  Synthetic
agcuuuggugaaagggagggccccucaugugu

SEQ ID NO: 7358 - RNA, 32 nt, Artificial Sequence
  Synthetic
gcuuuggugaaagggagggccccucaugugug

SEQ ID NO: 7359 - RNA, 32 nt, Artificial Sequence
  Synthetic
cuuuggugaaagggagggccccucaugugugc

SEQ ID NO: 7360 - RNA, 32 nt, Artificial Sequence
  Synthetic
uuuggugaaagggagggccccucaugugugcu

SEQ ID NO: 7361 - RNA, 32 nt, Artificial Sequence
  Synthetic
uuggugaaagggagggccccucaugugugcug

SEQ ID NO: 7362 - RNA, 32 nt, Artificial Sequence
  Synthetic
uggugaaagggagggccccucaugugugcugu

SEQ ID NO: 7363 - RNA, 32 nt, Artificial Sequence
  Synthetic
ggugaaagggagggccccucaugugugcugug

SEQ ID NO: 7364 - RNA, 32 nt, Artificial Sequence
  Synthetic
gugaaagggagggccccucaugugugcugugc

SEQ ID NO: 7365 - RNA, 32 nt, Artificial Sequence
  Synthetic
ugaaagggagggccccucaugugugcugugcu

SEQ ID NO: 7366 - RNA, 32 nt, Artificial Sequence
  Synthetic
gaaagggagggccccucaugugugcugugcug

SEQ ID NO: 7367 - RNA, 32 nt, Artificial Sequence
  Synthetic
aaagggagggccccucaugugugcugugcugu

SEQ ID NO: 7368 - RNA, 32 nt, Artificial Sequence
  Synthetic
aagggagggccccucaugugugcugugcugug

SEQ ID NO: 7369 - RNA, 32 nt, Artificial Sequence
  Synthetic
agggagggccccucaugugugcugugcugugu

SEQ ID NO: 7370 - RNA, 32 nt, Artificial Sequence
  Synthetic
gggagggccccucaugugugcugugcuguguc

SEQ ID NO: 7371 - RNA, 32 nt, Artificial Sequence
  Synthetic
ggagggccccucaugugugcugugcugugucu

SEQ ID NO: 7372 - RNA, 32 nt, Artificial Sequence
  Synthetic
gagggccccucaugugugcugugcugugucug

SEQ ID NO: 7373 - RNA, 32 nt, Artificial Sequence
  Synthetic
agggccccucaugugugcugugcugugucugc

SEQ ID NO: 7374 - RNA, 32 nt, Artificial Sequence
  Synthetic
gggccccucaugugugcugugcugugucugca

SEQ ID NO: 7375 - RNA, 32 nt, Artificial Sequence
  Synthetic
ggccccucaugugugcugugcugugucugcac

SEQ ID NO: 7376 - RNA, 32 nt, Artificial Sequence
  Synthetic
gccccucaugugugcugugcugugucugcacc

SEQ ID NO: 7377 - RNA, 32 nt, Artificial Sequence
  Synthetic
ccccucaugugugcugugcugugucugcaccg

SEQ ID NO: 7378 - RNA, 32 nt, Artificial Sequence
  Synthetic
cccucaugugugcugugcugugucugcaccgc

SEQ ID NO: 7379 - RNA, 32 nt, Artificial Sequence
  Synthetic
ccucaugugugcugugcugugucugcaccgcu

SEQ ID NO: 7380 - RNA, 32 nt, Artificial Sequence
  Synthetic
cucaugugugcugugcugugucugcaccgcuu

SEQ ID NO: 7381 - RNA, 32 nt, Artificial Sequence
  Synthetic
ucaugugugcugugcugugucugcaccgcuug

SEQ ID NO: 7382 - RNA, 32 nt, Artificial Sequence
  Synthetic
caugugugcugugcugugucugcaccgcuugg

SEQ ID NO: 7383 - RNA, 32 nt, Artificial Sequence
  Synthetic
augugugcugugcugugucugcaccgcuuggu

SEQ ID NO: 7384 - RNA, 32 nt, Artificial Sequence
  Synthetic
ugugugcugugcugugucugcaccgcuugguu

SEQ ID NO: 7385 - RNA, 32 nt, Artificial Sequence
  Synthetic
gugugcugugcugugucugcaccgcuugguuu

SEQ ID NO: 7386 - RNA, 32 nt, Artificial Sequence
  Synthetic
ugugcugugcugugucugcaccgcuugguuug

SEQ ID NO: 7387 - RNA, 32 nt, Artificial Sequence
  Synthetic
gugcugugcugugucugcaccgcuugguuugc

SEQ ID NO: 7388 - RNA, 32 nt, Artificial Sequence
  Synthetic
ugcugugcugugucugcaccgcuugguuugca

SEQ ID NO: 7389 - RNA, 32 nt, Artificial Sequence
  Synthetic
gcugugcugugucugcaccgcuugguuugcag

SEQ ID NO: 7390 - RNA, 32 nt, Artificial Sequence
  Synthetic
cugugcugugucugcaccgcuugguuugcagu

SEQ ID NO: 7391 - RNA, 32 nt, Artificial Sequence
  Synthetic
ugugcugugucugcaccgcuugguuugcaguu

SEQ ID NO: 7392 - RNA, 32 nt, Artificial Sequence
  Synthetic
gugcugugucugcaccgcuugguuugcaguug

SEQ ID NO: 7393 - RNA, 32 nt, Artificial Sequence
  Synthetic
ugcugugucugcaccgcuugguuugcaguuga

SEQ ID NO: 7394 - RNA, 32 nt, Artificial Sequence
  Synthetic
gcugugucugcaccgcuugguuugcaguugag

SEQ ID NO: 7395 - RNA, 32 nt, Artificial Sequence
  Synthetic
cugugucugcaccgcuugguuugcaguugaga

SEQ ID NO: 7396 - RNA, 32 nt, Artificial Sequence
  Synthetic
ugugucugcaccgcuugguuugcaguugagag

SEQ ID NO: 7397 - RNA, 32 nt, Artificial Sequence
  Synthetic
gugucugcaccgcuugguuugcaguugagagg

SEQ ID NO: 7398 - RNA, 32 nt, Artificial Sequence
  Synthetic
ugucugcaccgcuugguuugcaguugagaggg

SEQ ID NO: 7399 - RNA, 32 nt, Artificial Sequence
  Synthetic
gucugcaccgcuugguuugcaguugagagggg

SEQ ID NO: 7400 - RNA, 32 nt, Artificial Sequence
  Synthetic
ucugcaccgcuugguuugcaguugagagggga

SEQ ID NO: 7401 - RNA, 32 nt, Artificial Sequence
  Synthetic
cugcaccgcuugguuugcaguugagaggggag

SEQ ID NO: 7402 - RNA, 32 nt, Artificial Sequence
  Synthetic
ugcaccgcuugguuugcaguugagaggggagg

SEQ ID NO: 7403 - RNA, 32 nt, Artificial Sequence
  Synthetic
gcaccgcuugguuugcaguugagaggggaggg

SEQ ID NO: 7404 - RNA, 32 nt, Artificial Sequence
  Synthetic
caccgcuugguuugcaguugagaggggagggc

SEQ ID NO: 7405 - RNA, 32 nt, Artificial Sequence
  Synthetic
accgcuugguuugcaguugagaggggagggca

SEQ ID NO: 7406 - RNA, 32 nt, Artificial Sequence
  Synthetic
ccgcuugguuugcaguugagaggggagggcag

SEQ ID NO: 7407 - RNA, 32 nt, Artificial Sequence
  Synthetic
cgcuugguuugcaguugagaggggagggcagg

SEQ ID NO: 7408 - RNA, 32 nt, Artificial Sequence
  Synthetic
gcuugguuugcaguugagaggggagggcagga

SEQ ID NO: 7409 - RNA, 32 nt, Artificial Sequence
  Synthetic
cuugguuugcaguugagaggggagggcaggag

SEQ ID NO: 7410 - RNA, 32 nt, Artificial Sequence
  Synthetic
uugguuugcaguugagaggggagggcaggagg

SEQ ID NO: 7411 - RNA, 32 nt, Artificial Sequence
  Synthetic
ugguuugcaguugagaggggagggcaggaggg

SEQ ID NO: 7412 - RNA, 32 nt, Artificial Sequence
  Synthetic
gguuugcaguugagaggggagggcaggagggg

SEQ ID NO: 7413 - RNA, 32 nt, Artificial Sequence
  Synthetic
guuugcaguugagaggggagggcaggaggggu

SEQ ID NO: 7414 - RNA, 32 nt, Artificial Sequence
  Synthetic
uuugcaguugagaggggagggcaggaggggug

SEQ ID NO: 7415 - RNA, 32 nt, Artificial Sequence
  Synthetic
uugcaguugagaggggagggcaggaggggugu

SEQ ID NO: 7416 - RNA, 32 nt, Artificial Sequence
  Synthetic
ugcaguugagaggggagggcaggaggggugug

SEQ ID NO: 7417 - RNA, 32 nt, Artificial Sequence
  Synthetic
gcaguugagaggggagggcaggagggguguga

SEQ ID NO: 7418 - RNA, 32 nt, Artificial Sequence
  Synthetic
caguugagaggggagggcaggaggggugugau

SEQ ID NO: 7419 - RNA, 32 nt, Artificial Sequence
  Synthetic
aguugagaggggagggcaggaggggugugauu

SEQ ID NO: 7420 - RNA, 32 nt, Artificial Sequence
  Synthetic
guugagaggggagggcaggaggggugugauug

SEQ ID NO: 7421 - RNA, 32 nt, Artificial Sequence
  Synthetic
uugagaggggagggcaggaggggugugauugg

SEQ ID NO: 7422 - RNA, 32 nt, Artificial Sequence
  Synthetic
ugagaggggagggcaggaggggugugauugga

SEQ ID NO: 7423 - RNA, 32 nt, Artificial Sequence
  Synthetic
gagaggggagggcaggaggggugugauuggag

SEQ ID NO: 7424 - RNA, 32 nt, Artificial Sequence
  Synthetic
agaggggagggcaggaggggugugauuggagu

SEQ ID NO: 7425 - RNA, 32 nt, Artificial Sequence
  Synthetic
gaggggagggcaggaggggugugauuggagug

SEQ ID NO: 7426 - RNA, 32 nt, Artificial Sequence
  Synthetic
aggggagggcaggaggggugugauuggagugu

SEQ ID NO: 7427 - RNA, 32 nt, Artificial Sequence
  Synthetic
ggggagggcaggaggggugugauuggagugug

SEQ ID NO: 7428 - RNA, 32 nt, Artificial Sequence
  Synthetic
gggagggcaggaggggugugauuggagugugu

SEQ ID NO: 7429 - RNA, 32 nt, Artificial Sequence
  Synthetic
ggagggcaggaggggugugauuggaguguguc

SEQ ID NO: 7430 - RNA, 32 nt, Artificial Sequence
  Synthetic
gagggcaggaggggugugauuggagugugucc

SEQ ID NO: 7431 - RNA, 32 nt, Artificial Sequence
  Synthetic
agggcaggaggggugugauuggaguguguccg

SEQ ID NO: 7432 - RNA, 32 nt, Artificial Sequence
  Synthetic
gggcaggaggggugugauuggaguguguccgg

SEQ ID NO: 7433 - RNA, 32 nt, Artificial Sequence
  Synthetic
ggcaggaggggugugauuggaguguguccgga

SEQ ID NO: 7434 - RNA, 32 nt, Artificial Sequence
  Synthetic
gcaggaggggugugauuggaguguguccggag

SEQ ID NO: 7435 - RNA, 32 nt, Artificial Sequence
  Synthetic
caggaggggugugauuggaguguguccggaga

SEQ ID NO: 7436 - RNA, 32 nt, Artificial Sequence
  Synthetic
aggaggggugugauuggaguguguccggagau

SEQ ID NO: 7437 - RNA, 32 nt, Artificial Sequence
  Synthetic
ggaggggugugauuggaguguguccggagaug

SEQ ID NO: 7438 - RNA, 32 nt, Artificial Sequence
  Synthetic
gaggggugugauuggaguguguccggagauga

SEQ ID NO: 7439 - RNA, 32 nt, Artificial Sequence
  Synthetic
aggggugugauuggaguguguccggagaugag

SEQ ID NO: 7440 - RNA, 32 nt, Artificial Sequence
  Synthetic
ggggugugauuggaguguguccggagaugaga

SEQ ID NO: 7441 - RNA, 32 nt, Artificial Sequence
  Synthetic
gggugugauuggaguguguccggagaugagau

SEQ ID NO: 7442 - RNA, 32 nt, Artificial Sequence
  Synthetic
ggugugauuggaguguguccggagaugagaug

SEQ ID NO: 7443 - RNA, 32 nt, Artificial Sequence
  Synthetic
gugugauuggaguguguccggagaugagauga

SEQ ID NO: 7444 - RNA, 32 nt, Artificial Sequence
  Synthetic
ugugauuggaguguguccggagaugagaugaa

SEQ ID NO: 7445 - RNA, 32 nt, Artificial Sequence
  Synthetic
gugauuggaguguguccggagaugagaugaaa

SEQ ID NO: 7446 - RNA, 32 nt, Artificial Sequence
  Synthetic
ugauuggaguguguccggagaugagaugaaaa

SEQ ID NO: 7447 - RNA, 32 nt, Artificial Sequence
  Synthetic
gauuggaguguguccggagaugagaugaaaaa

SEQ ID NO: 7448 - RNA, 32 nt, Artificial Sequence
  Synthetic
auuggaguguguccggagaugagaugaaaaaa

SEQ ID NO: 7449 - RNA, 32 nt, Artificial Sequence
  Synthetic
uuggaguguguccggagaugagaugaaaaaaa

SEQ ID NO: 7450 - RNA, 32 nt, Artificial Sequence
  Synthetic
uggaguguguccggagaugagaugaaaaaaau

SEQ ID NO: 7451 - RNA, 32 nt, Artificial Sequence
  Synthetic
ggaguguguccggagaugagaugaaaaaaaua

SEQ ID NO: 7452 - RNA, 32 nt, Artificial Sequence
  Synthetic
gaguguguccggagaugagaugaaaaaaauac

SEQ ID NO: 7453 - RNA, 32 nt, Artificial Sequence
  Synthetic
aguguguccggagaugagaugaaaaaaauaca

SEQ ID NO: 7454 - RNA, 32 nt, Artificial Sequence
  Synthetic
guguguccggagaugagaugaaaaaaauacau

SEQ ID NO: 7455 - RNA, 32 nt, Artificial Sequence
  Synthetic
uguguccggagaugagaugaaaaaaauacauc

SEQ ID NO: 7456 - RNA, 32 nt, Artificial Sequence
  Synthetic
guguccggagaugagaugaaaaaaauacaucu

SEQ ID NO: 7457 - RNA, 32 nt, Artificial Sequence
  Synthetic
uguccggagaugagaugaaaaaaauacaucua

SEQ ID NO: 7458 - RNA, 32 nt, Artificial Sequence
  Synthetic
guccggagaugagaugaaaaaaauacaucuau

SEQ ID NO: 7459 - RNA, 32 nt, Artificial Sequence
  Synthetic
uccggagaugagaugaaaaaaauacaucuaua

SEQ ID NO: 7460 - RNA, 32 nt, Artificial Sequence
  Synthetic
ccggagaugagaugaaaaaaauacaucuauau

SEQ ID NO: 7461 - RNA, 32 nt, Artificial Sequence
  Synthetic
cggagaugagaugaaaaaaauacaucuauauu

SEQ ID NO: 7462 - RNA, 32 nt, Artificial Sequence
  Synthetic
ggagaugagaugaaaaaaauacaucuauauuu

SEQ ID NO: 7463 - RNA, 32 nt, Artificial Sequence
  Synthetic
gagaugagaugaaaaaaauacaucuauauuua

SEQ ID NO: 7464 - RNA, 32 nt, Artificial Sequence
  Synthetic
agaugagaugaaaaaaauacaucuauauuuaa

SEQ ID NO: 7465 - RNA, 32 nt, Artificial Sequence
  Synthetic
gaugagaugaaaaaaauacaucuauauuuaag

SEQ ID NO: 7466 - RNA, 32 nt, Artificial Sequence
  Synthetic
augagaugaaaaaaauacaucuauauuuaaga

SEQ ID NO: 7467 - RNA, 32 nt, Artificial Sequence
  Synthetic
ugagaugaaaaaaauacaucuauauuuaagaa

SEQ ID NO: 7468 - RNA, 32 nt, Artificial Sequence
  Synthetic
gagaugaaaaaaauacaucuauauuuaagaau

SEQ ID NO: 7469 - RNA, 32 nt, Artificial Sequence
  Synthetic
agaugaaaaaaauacaucuauauuuaagaauc

SEQ ID NO: 7470 - RNA, 32 nt, Artificial Sequence
  Synthetic
gaugaaaaaaauacaucuauauuuaagaaucc

SEQ ID NO: 7471 - RNA, 32 nt, Artificial Sequence
  Synthetic
augaaaaaaauacaucuauauuuaagaauccc

SEQ ID NO: 7472 - RNA, 32 nt, Artificial Sequence
  Synthetic
ugaaaaaaauacaucuauauuuaagaauccca

SEQ ID NO: 7473 - RNA, 32 nt, Artificial Sequence
  Synthetic
gaaaaaaauacaucuauauuuaagaaucccaa

SEQ ID NO: 7474 - RNA, 32 nt, Artificial Sequence
  Synthetic
aaaaaaauacaucuauauuuaagaaucccaaa

SEQ ID NO: 7475 - RNA, 32 nt, Artificial Sequence
  Synthetic
aaaaaauacaucuauauuuaagaaucccaaaa

SEQ ID NO: 7476 - RNA, 32 nt, Artificial Sequence
  Synthetic
aaaaauacaucuauauuuaagaaucccaaaaa

SEQ ID NO: 7477 - RNA, 32 nt, Artificial Sequence
  Synthetic
aaaauacaucuauauuuaagaaucccaaaaaa

SEQ ID NO: 7478 - RNA, 32 nt, Artificial Sequence
  Synthetic
aaauacaucuauauuuaagaaucccaaaaaaa

SEQ ID NO: 7479 - RNA, 32 nt, Artificial Sequence
  Synthetic
aauacaucuauauuuaagaaucccaaaaaaaa

SEQ ID NO: 7480 - RNA, 32 nt, Artificial Sequence
  Synthetic
auacaucuauauuuaagaaucccaaaaaaaaa

SEQ ID NO: 7481 - RNA, 32 nt, Artificial Sequence
  Synthetic
uacaucuauauuuaagaaucccaaaaaaaaaa

SEQ ID NO: 7482 - RNA, 32 nt, Artificial Sequence
  Synthetic
acaucuauauuuaagaaucccaaaaaaaaaaa

SEQ ID NO: 7483 - RNA, 32 nt, Artificial Sequence
  Synthetic
caucuauauuuaagaaucccaaaaaaaaaaaa

SEQ ID NO: 7484 - RNA, 32 nt, Artificial Sequence
  Synthetic
aucuauauuuaagaaucccaaaaaaaaaaaaa

SEQ ID NO: 7485 - RNA, 32 nt, Artificial Sequence
  Synthetic
ucuauauuuaagaaucccaaaaaaaaaaaaaa

SEQ ID NO: 7486 - RNA, 32 nt, Artificial Sequence
  Synthetic
cuauauuuaagaaucccaaaaaaaaaaaaaaa

SEQ ID NO: 7487 - RNA, 32 nt, Artificial Sequence
  Synthetic
uauauuuaagaaucccaaaaaaaaaaaaaaaa

SEQ ID NO: 7488 - RNA, 32 nt, Artificial Sequence
  Synthetic
auauuuaagaaucccaaaaaaaaaaaaaaaaa

SEQ ID NO: 7489 - RNA, 32 nt, Artificial Sequence
  Synthetic
uauuuaagaaucccaaaaaaaaaaaaaaaaaa

SEQ ID NO: 7490 - RNA, 31 nt, Artificial Sequence
  Synthetic
auuuaagaaucccaaaaaaaaaaaaaaaaaa

SEQ ID NO: 7491 - RNA, 30 nt, Artificial Sequence
  Synthetic
uuuaagaaucccaaaaaaaaaaaaaaaaaa

SEQ ID NO: 7492 - RNA, 29 nt, Artificial Sequence
  Synthetic
uuaagaaucccaaaaaaaaaaaaaaaaaa

SEQ ID NO: 7493 - RNA, 28 nt, Artificial Sequence
  Synthetic
uaagaaucccaaaaaaaaaaaaaaaaaa

SEQ ID NO: 7494 - RNA, 12 nt, Artificial Sequence
  Synthetic
cagccgccagga

SEQ ID NO: 7495 - RNA, 12 nt, Artificial Sequence
  Synthetic
gcagccgccagg

SEQ ID NO: 7496 - RNA, 12 nt, Artificial Sequence
  Synthetic
cgcagccgccag

SEQ ID NO: 7497 - RNA, 12 nt, Artificial Sequence
  Synthetic
ucgcagccgcca

SEQ ID NO: 7498 - RNA, 12 nt, Artificial Sequence
  Synthetic
cucgcagccgcc

SEQ ID NO: 7499 - RNA, 12 nt, Artificial Sequence
  Synthetic
ccucgcagccgc

SEQ ID NO: 7500 - RNA, 12 nt, Artificial Sequence
  Synthetic
accucgcagccg

SEQ ID NO: 7501 - RNA, 12 nt, Artificial Sequence
  Synthetic
aaccucgcagcc

SEQ ID NO: 7502 - RNA, 12 nt, Artificial Sequence
  Synthetic
aaaccucgcagc

SEQ ID NO: 7503 - RNA, 12 nt, Artificial Sequence
  Synthetic
gaaaccucgcag

SEQ ID NO: 7504 - RNA, 12 nt, Artificial Sequence
  Synthetic
ugaaaccucgca

SEQ ID NO: 7505 - RNA, 12 nt, Artificial Sequence
  Synthetic
gugaaaccucgc

SEQ ID NO: 7506 - RNA, 12 nt, Artificial Sequence
  Synthetic
agugaaaccucg

SEQ ID NO: 7507 - RNA, 12 nt, Artificial Sequence
  Synthetic
cagugaaaccuc

SEQ ID NO: 7508 - RNA, 12 nt, Artificial Sequence
  Synthetic
gcagugaaaccu

SEQ ID NO: 7509 - RNA, 12 nt, Artificial Sequence
  Synthetic
ugcagugaaacc

SEQ ID NO: 7510 - RNA, 12 nt, Artificial Sequence
  Synthetic
cugcagugaaac

SEQ ID NO: 7511 - RNA, 12 nt, Artificial Sequence
  Synthetic
ccugcagugaaa

SEQ ID NO: 7512 - RNA, 12 nt, Artificial Sequence
  Synthetic
cccugcagugaa

SEQ ID NO: 7513 - RNA, 12 nt, Artificial Sequence
  Synthetic
ccccugcaguga

SEQ ID NO: 7514 - RNA, 12 nt, Artificial Sequence
  Synthetic
gccccugcagug

SEQ ID NO: 7515 - RNA, 12 nt, Artificial Sequence
  Synthetic
cgccccugcagu

SEQ ID NO: 7516 - RNA, 12 nt, Artificial Sequence
  Synthetic
gcgccccugcag

SEQ ID NO: 7517 - RNA, 12 nt, Artificial Sequence
  Synthetic
ggcgccccugca

SEQ ID NO: 7518 - RNA, 12 nt, Artificial Sequence
  Synthetic
uggcgccccugc

SEQ ID NO: 7519 - RNA, 12 nt, Artificial Sequence
  Synthetic
cuggcgccccug

SEQ ID NO: 7520 - RNA, 12 nt, Artificial Sequence
  Synthetic
acuggcgccccu

SEQ ID NO: 7521 - RNA, 12 nt, Artificial Sequence
  Synthetic
cacuggcgcccc

SEQ ID NO: 7522 - RNA, 12 nt, Artificial Sequence
  Synthetic
ccacuggcgccc

SEQ ID NO: 7523 - RNA, 12 nt, Artificial Sequence
  Synthetic
cccacuggcgcc

SEQ ID NO: 7524 - RNA, 12 nt, Artificial Sequence
  Synthetic
gcccacuggcgc

SEQ ID NO: 7525 - RNA, 12 nt, Artificial Sequence
  Synthetic
agcccacuggcg

SEQ ID NO: 7526 - RNA, 12 nt, Artificial Sequence
  Synthetic
gagcccacuggc

SEQ ID NO: 7527 - RNA, 12 nt, Artificial Sequence
  Synthetic
ugagcccacugg

SEQ ID NO: 7528 - RNA, 12 nt, Artificial Sequence
  Synthetic
cugagcccacug

SEQ ID NO: 7529 - RNA, 12 nt, Artificial Sequence
  Synthetic
acugagcccacu

SEQ ID NO: 7530 - RNA, 12 nt, Artificial Sequence
  Synthetic
cacugagcccac

SEQ ID NO: 7531 - RNA, 12 nt, Artificial Sequence
  Synthetic
ucacugagccca

SEQ ID NO: 7532 - RNA, 12 nt, Artificial Sequence
  Synthetic
gucacugagccc

SEQ ID NO: 7533 - RNA, 12 nt, Artificial Sequence
  Synthetic
cgucacugagcc

SEQ ID NO: 7534 - RNA, 12 nt, Artificial Sequence
  Synthetic
gcgucacugagc

SEQ ID NO: 7535 - RNA, 12 nt, Artificial Sequence
  Synthetic
agcgucacugag

SEQ ID NO: 7536 - RNA, 12 nt, Artificial Sequence
  Synthetic
cagcgucacuga

SEQ ID NO: 7537 - RNA, 12 nt, Artificial Sequence
  Synthetic
gcagcgucacug

SEQ ID NO: 7538 - RNA, 12 nt, Artificial Sequence
  Synthetic
cgcagcgucacu

SEQ ID NO: 7539 - RNA, 12 nt, Artificial Sequence
  Synthetic
ccgcagcgucac

SEQ ID NO: 7540 - RNA, 12 nt, Artificial Sequence
  Synthetic
gccgcagcguca

SEQ ID NO: 7541 - RNA, 12 nt, Artificial Sequence
  Synthetic
ggccgcagcguc

SEQ ID NO: 7542 - RNA, 12 nt, Artificial Sequence
  Synthetic
aggccgcagcgu

SEQ ID NO: 7543 - RNA, 12 nt, Artificial Sequence
  Synthetic
gaggccgcagcg

SEQ ID NO: 7544 - RNA, 12 nt, Artificial Sequence
  Synthetic
ggaggccgcagc

SEQ ID NO: 7545 - RNA, 12 nt, Artificial Sequence
  Synthetic
aggaggccgcag

SEQ ID NO: 7546 - RNA, 12 nt, Artificial Sequence
  Synthetic
aaggaggccgca

SEQ ID NO: 7547 - RNA, 12 nt, Artificial Sequence
  Synthetic
gaaggaggccgc

SEQ ID NO: 7548 - RNA, 12 nt, Artificial Sequence
  Synthetic
agaaggaggccg

SEQ ID NO: 7549 - RNA, 12 nt, Artificial Sequence
  Synthetic
cagaaggaggcc

SEQ ID NO: 7550 - RNA, 12 nt, Artificial Sequence
  Synthetic
gcagaaggaggc

SEQ ID NO: 7551 - RNA, 12 nt, Artificial Sequence
  Synthetic
ggcagaaggagg

SEQ ID NO: 7552 - RNA, 12 nt, Artificial Sequence
  Synthetic
aggcagaaggag

SEQ ID NO: 7553 - RNA, 12 nt, Artificial Sequence
  Synthetic
uaggcagaagga

SEQ ID NO: 7554 - RNA, 12 nt, Artificial Sequence
  Synthetic
cuaggcagaagg

SEQ ID NO: 7555 - RNA, 12 nt, Artificial Sequence
  Synthetic
ccuaggcagaag

SEQ ID NO: 7556 - RNA, 12 nt, Artificial Sequence
  Synthetic
accuaggcagaa

SEQ ID NO: 7557 - RNA, 12 nt, Artificial Sequence
  Synthetic
gaccuaggcaga

SEQ ID NO: 7558 - RNA, 12 nt, Artificial Sequence
  Synthetic
ggaccuaggcag

SEQ ID NO: 7559 - RNA, 12 nt, Artificial Sequence
  Synthetic
gggaccuaggca

SEQ ID NO: 7560 - RNA, 12 nt, Artificial Sequence
  Synthetic
ugggaccuaggc

SEQ ID NO: 7561 - RNA, 12 nt, Artificial Sequence
  Synthetic
uugggaccuagg

SEQ ID NO: 7562 - RNA, 12 nt, Artificial Sequence
  Synthetic
guugggaccuag

SEQ ID NO: 7563 - RNA, 12 nt, Artificial Sequence
  Synthetic
cguugggaccua

SEQ ID NO: 7564 - RNA, 12 nt, Artificial Sequence
  Synthetic
gcguugggaccu

SEQ ID NO: 7565 - RNA, 12 nt, Artificial Sequence
  Synthetic
agcguugggacc

SEQ ID NO: 7566 - RNA, 12 nt, Artificial Sequence
  Synthetic
aagcguugggac

SEQ ID NO: 7567 - RNA, 12 nt, Artificial Sequence
  Synthetic
gaagcguuggga

SEQ ID NO: 7568 - RNA, 12 nt, Artificial Sequence
  Synthetic
cgaagcguuggg

SEQ ID NO: 7569 - RNA, 12 nt, Artificial Sequence
  Synthetic
ccgaagcguugg

SEQ ID NO: 7570 - RNA, 12 nt, Artificial Sequence
  Synthetic
cccgaagcguug

SEQ ID NO: 7571 - RNA, 12 nt, Artificial Sequence
  Synthetic
ccccgaagcguu

SEQ ID NO: 7572 - RNA, 12 nt, Artificial Sequence
  Synthetic
gccccgaagcgu

SEQ ID NO: 7573 - RNA, 12 nt, Artificial Sequence
  Synthetic
ugccccgaagcg

SEQ ID NO: 7574 - RNA, 12 nt, Artificial Sequence
  Synthetic
cugccccgaagc

SEQ ID NO: 7575 - RNA, 12 nt, Artificial Sequence
  Synthetic
ccugccccgaag

SEQ ID NO: 7576 - RNA, 12 nt, Artificial Sequence
  Synthetic
cccugccccgaa

SEQ ID NO: 7577 - RNA, 12 nt, Artificial Sequence
  Synthetic
ccccugccccga

SEQ ID NO: 7578 - RNA, 12 nt, Artificial Sequence
  Synthetic
accccugccccg

SEQ ID NO: 7579 - RNA, 12 nt, Artificial Sequence
  Synthetic
caccccugcccc

SEQ ID NO: 7580 - RNA, 12 nt, Artificial Sequence
  Synthetic
gcaccccugccc

SEQ ID NO: 7581 - RNA, 12 nt, Artificial Sequence
  Synthetic
cgcaccccugcc

SEQ ID NO: 7582 - RNA, 12 nt, Artificial Sequence
  Synthetic
ccgcaccccugc

SEQ ID NO: 7583 - RNA, 12 nt, Artificial Sequence
  Synthetic
accgcaccccug

SEQ ID NO: 7584 - RNA, 12 nt, Artificial Sequence
  Synthetic
gaccgcaccccu

SEQ ID NO: 7585 - RNA, 12 nt, Artificial Sequence
  Synthetic
agaccgcacccc

SEQ ID NO: 7586 - RNA, 12 nt, Artificial Sequence
  Synthetic
aagaccgcaccc

SEQ ID NO: 7587 - RNA, 12 nt, Artificial Sequence
  Synthetic
caagaccgcacc

SEQ ID NO: 7588 - RNA, 12 nt, Artificial Sequence
  Synthetic
gcaagaccgcac

SEQ ID NO: 7589 - RNA, 12 nt, Artificial Sequence
  Synthetic
ugcaagaccgca

SEQ ID NO: 7590 - RNA, 12 nt, Artificial Sequence
  Synthetic
uugcaagaccgc

SEQ ID NO: 7591 - RNA, 12 nt, Artificial Sequence
  Synthetic
auugcaagaccg

SEQ ID NO: 7592 - RNA, 12 nt, Artificial Sequence
  Synthetic
uauugcaagacc

SEQ ID NO: 7593 - RNA, 12 nt, Artificial Sequence
  Synthetic
cuauugcaagac

SEQ ID NO: 7594 - RNA, 12 nt, Artificial Sequence
  Synthetic
ccuauugcaaga

SEQ ID NO: 7595 - RNA, 12 nt, Artificial Sequence
  Synthetic
uccuauugcaag

SEQ ID NO: 7596 - RNA, 12 nt, Artificial Sequence
  Synthetic
uuccuauugcaa

SEQ ID NO: 7597 - RNA, 12 nt, Artificial Sequence
  Synthetic
cuuccuauugca

SEQ ID NO: 7598 - RNA, 12 nt, Artificial Sequence
  Synthetic
gcuuccuauugc

SEQ ID NO: 7599 - RNA, 12 nt, Artificial Sequence
  Synthetic
ggcuuccuauug

SEQ ID NO: 7600 - RNA, 12 nt, Artificial Sequence
  Synthetic
cggcuuccuauu

SEQ ID NO: 7601 - RNA, 12 nt, Artificial Sequence
  Synthetic
ucggcuuccuau

SEQ ID NO: 7602 - RNA, 12 nt, Artificial Sequence
  Synthetic
cucggcuuccua

SEQ ID NO: 7603 - RNA, 12 nt, Artificial Sequence
  Synthetic
gcucggcuuccu

SEQ ID NO: 7604 - RNA, 12 nt, Artificial Sequence
  Synthetic
cgcucggcuucc

SEQ ID NO: 7605 - RNA, 12 nt, Artificial Sequence
  Synthetic
acgcucggcuuc

SEQ ID NO: 7606 - RNA, 12 nt, Artificial Sequence
  Synthetic
gacgcucggcuu

SEQ ID NO: 7607 - RNA, 12 nt, Artificial Sequence
  Synthetic
agacgcucggcu

SEQ ID NO: 7608 - RNA, 12 nt, Artificial Sequence
  Synthetic
aagacgcucggc

SEQ ID NO: 7609 - RNA, 12 nt, Artificial Sequence
  Synthetic
caagacgcucgg

SEQ ID NO: 7610 - RNA, 12 nt, Artificial Sequence
  Synthetic
gcaagacgcucg

SEQ ID NO: 7611 - RNA, 12 nt, Artificial Sequence
  Synthetic
ugcaagacgcuc

SEQ ID NO: 7612 - RNA, 12 nt, Artificial Sequence
  Synthetic
uugcaagacgcu

SEQ ID NO: 7613 - RNA, 12 nt, Artificial Sequence
  Synthetic
cuugcaagacgc

SEQ ID NO: 7614 - RNA, 12 nt, Artificial Sequence
  Synthetic
gcuugcaagacg

SEQ ID NO: 7615 - RNA, 12 nt, Artificial Sequence
  Synthetic
agcuugcaagac

SEQ ID NO: 7616 - RNA, 12 nt, Artificial Sequence
  Synthetic
aagcuugcaaga

SEQ ID NO: 7617 - RNA, 12 nt, Artificial Sequence
  Synthetic
gaagcuugcaag

SEQ ID NO: 7618 - RNA, 12 nt, Artificial Sequence
  Synthetic
ggaagcuugcaa

SEQ ID NO: 7619 - RNA, 12 nt, Artificial Sequence
  Synthetic
gggaagcuugca

SEQ ID NO: 7620 - RNA, 12 nt, Artificial Sequence
  Synthetic
cgggaagcuugc

SEQ ID NO: 7621 - RNA, 12 nt, Artificial Sequence
  Synthetic
acgggaagcuug

SEQ ID NO: 7622 - RNA, 12 nt, Artificial Sequence
  Synthetic
gacgggaagcuu

SEQ ID NO: 7623 - RNA, 12 nt, Artificial Sequence
  Synthetic
cgacgggaagcu

SEQ ID NO: 7624 - RNA, 12 nt, Artificial Sequence
  Synthetic
ccgacgggaagc

SEQ ID NO: 7625 - RNA, 12 nt, Artificial Sequence
  Synthetic
cccgacgggaag

SEQ ID NO: 7626 - RNA, 12 nt, Artificial Sequence
  Synthetic
gcccgacgggaa

SEQ ID NO: 7627 - RNA, 12 nt, Artificial Sequence
  Synthetic
ugcccgacggga

SEQ ID NO: 7628 - RNA, 12 nt, Artificial Sequence
  Synthetic
gugcccgacggg

SEQ ID NO: 7629 - RNA, 12 nt, Artificial Sequence
  Synthetic
ggugcccgacgg

SEQ ID NO: 7630 - RNA, 12 nt, Artificial Sequence
  Synthetic
uggugcccgacg

SEQ ID NO: 7631 - RNA, 12 nt, Artificial Sequence
  Synthetic
cuggugcccgac

SEQ ID NO: 7632 - RNA, 12 nt, Artificial Sequence
  Synthetic
gcuggugcccga

SEQ ID NO: 7633 - RNA, 12 nt, Artificial Sequence
  Synthetic
agcuggugcccg

SEQ ID NO: 7634 - RNA, 12 nt, Artificial Sequence
  Synthetic
uagcuggugccc

SEQ ID NO: 7635 - RNA, 12 nt, Artificial Sequence
  Synthetic
guagcuggugcc

SEQ ID NO: 7636 - RNA, 12 nt, Artificial Sequence
  Synthetic
aguagcuggugc

SEQ ID NO: 7637 - RNA, 12 nt, Artificial Sequence
  Synthetic
gaguagcuggug

SEQ ID NO: 7638 - RNA, 12 nt, Artificial Sequence
  Synthetic
cgaguagcuggu

SEQ ID NO: 7639 - RNA, 12 nt, Artificial Sequence
  Synthetic
ccgaguagcugg

SEQ ID NO: 7640 - RNA, 12 nt, Artificial Sequence
  Synthetic
gccgaguagcug

SEQ ID NO: 7641 - RNA, 12 nt, Artificial Sequence
  Synthetic
ggccgaguagcu

SEQ ID NO: 7642 - RNA, 12 nt, Artificial Sequence
  Synthetic
gggccgaguagc

SEQ ID NO: 7643 - RNA, 12 nt, Artificial Sequence
  Synthetic
ggggccgaguag

SEQ ID NO: 7644 - RNA, 12 nt, Artificial Sequence
  Synthetic
cggggccgagua

SEQ ID NO: 7645 - RNA, 12 nt, Artificial Sequence
  Synthetic
gcggggccgagu

SEQ ID NO: 7646 - RNA, 12 nt, Artificial Sequence
  Synthetic
ugcggggccgag

SEQ ID NO: 7647 - RNA, 12 nt, Artificial Sequence
  Synthetic
gugcggggccga

SEQ ID NO: 7648 - RNA, 12 nt, Artificial Sequence
  Synthetic
ggugcggggccg

SEQ ID NO: 7649 - RNA, 12 nt, Artificial Sequence
  Synthetic
gggugcggggcc

SEQ ID NO: 7650 - RNA, 12 nt, Artificial Sequence
  Synthetic
agggugcggggc

SEQ ID NO: 7651 - RNA, 12 nt, Artificial Sequence
  Synthetic
uagggugcgggg

SEQ ID NO: 7652 - RNA, 12 nt, Artificial Sequence
  Synthetic
guagggugcggg

SEQ ID NO: 7653 - RNA, 12 nt, Artificial Sequence
  Synthetic
gguagggugcgg

SEQ ID NO: 7654 - RNA, 12 nt, Artificial Sequence
  Synthetic
agguagggugcg

SEQ ID NO: 7655 - RNA, 12 nt, Artificial Sequence
  Synthetic
cagguagggugc

SEQ ID NO: 7656 - RNA, 12 nt, Artificial Sequence
  Synthetic
ccagguagggug

SEQ ID NO: 7657 - RNA, 12 nt, Artificial Sequence
  Synthetic
accagguagggu

SEQ ID NO: 7658 - RNA, 12 nt, Artificial Sequence
  Synthetic
caccagguaggg

SEQ ID NO: 7659 - RNA, 12 nt, Artificial Sequence
  Synthetic
gcaccagguagg

SEQ ID NO: 7660 - RNA, 12 nt, Artificial Sequence
  Synthetic
ugcaccagguag

SEQ ID NO: 7661 - RNA, 12 nt, Artificial Sequence
  Synthetic
augcaccaggua

SEQ ID NO: 7662 - RNA, 12 nt, Artificial Sequence
  Synthetic
aaugcaccaggu

SEQ ID NO: 7663 - RNA, 12 nt, Artificial Sequence
  Synthetic
gaaugcaccagg

SEQ ID NO: 7664 - RNA, 12 nt, Artificial Sequence
  Synthetic
ggaaugcaccag

SEQ ID NO: 7665 - RNA, 12 nt, Artificial Sequence
  Synthetic
gggaaugcacca

SEQ ID NO: 7666 - RNA, 12 nt, Artificial Sequence
  Synthetic
agggaaugcacc

SEQ ID NO: 7667 - RNA, 12 nt, Artificial Sequence
  Synthetic
uagggaaugcac

SEQ ID NO: 7668 - RNA, 12 nt, Artificial Sequence
  Synthetic
cuagggaaugca

SEQ ID NO: 7669 - RNA, 12 nt, Artificial Sequence
  Synthetic
ucuagggaaugc

SEQ ID NO: 7670 - RNA, 12 nt, Artificial Sequence
  Synthetic
gucuagggaaug

SEQ ID NO: 7671 - RNA, 12 nt, Artificial Sequence
  Synthetic
ugucuagggaau

SEQ ID NO: 7672 - RNA, 12 nt, Artificial Sequence
  Synthetic
gugucuagggaa

SEQ ID NO: 7673 - RNA, 12 nt, Artificial Sequence
  Synthetic
ggugucuaggga

SEQ ID NO: 7674 - RNA, 12 nt, Artificial Sequence
  Synthetic
aggugucuaggg

SEQ ID NO: 7675 - RNA, 12 nt, Artificial Sequence
  Synthetic
gaggugucuagg

SEQ ID NO: 7676 - RNA, 12 nt, Artificial Sequence
  Synthetic
ggaggugucuag

SEQ ID NO: 7677 - RNA, 12 nt, Artificial Sequence
  Synthetic
cggaggugucua

SEQ ID NO: 7678 - RNA, 12 nt, Artificial Sequence
  Synthetic
ccggaggugucu

SEQ ID NO: 7679 - RNA, 12 nt, Artificial Sequence
  Synthetic
cccggagguguc

SEQ ID NO: 7680 - RNA, 12 nt, Artificial Sequence
  Synthetic
ccccggaggugu

SEQ ID NO: 7681 - RNA, 12 nt, Artificial Sequence
  Synthetic
accccggaggug

SEQ ID NO: 7682 - RNA, 12 nt, Artificial Sequence
  Synthetic
gaccccggaggu

SEQ ID NO: 7683 - RNA, 12 nt, Artificial Sequence
  Synthetic
ggaccccggagg

SEQ ID NO: 7684 - RNA, 12 nt, Artificial Sequence
  Synthetic
gggaccccggag

SEQ ID NO: 7685 - RNA, 12 nt, Artificial Sequence
  Synthetic
agggaccccgga

SEQ ID NO: 7686 - RNA, 12 nt, Artificial Sequence
  Synthetic
uagggaccccgg

SEQ ID NO: 7687 - RNA, 12 nt, Artificial Sequence
  Synthetic
guagggaccccg

SEQ ID NO: 7688 - RNA, 12 nt, Artificial Sequence
  Synthetic
gguagggacccc

SEQ ID NO: 7689 - RNA, 12 nt, Artificial Sequence
  Synthetic
agguagggaccc

SEQ ID NO: 7690 - RNA, 12 nt, Artificial Sequence
  Synthetic
cagguagggacc

SEQ ID NO: 7691 - RNA, 12 nt, Artificial Sequence
  Synthetic
ccagguagggac

SEQ ID NO: 7692 - RNA, 12 nt, Artificial Sequence
  Synthetic
uccagguaggga

SEQ ID NO: 7693 - RNA, 12 nt, Artificial Sequence
  Synthetic
cuccagguaggg

SEQ ID NO: 7694 - RNA, 12 nt, Artificial Sequence
  Synthetic
ucuccagguagg

SEQ ID NO: 7695 - RNA, 12 nt, Artificial Sequence
  Synthetic
aucuccagguag

SEQ ID NO: 7696 - RNA, 12 nt, Artificial Sequence
  Synthetic
gaucuccaggua

SEQ ID NO: 7697 - RNA, 12 nt, Artificial Sequence
  Synthetic
ggaucuccaggu

SEQ ID NO: 7698 - RNA, 12 nt, Artificial Sequence
  Synthetic
gggaucuccagg

SEQ ID NO: 7699 - RNA, 12 nt, Artificial Sequence
  Synthetic
ggggaucuccag

SEQ ID NO: 7700 - RNA, 12 nt, Artificial Sequence
  Synthetic
cggggaucucca

SEQ ID NO: 7701 - RNA, 12 nt, Artificial Sequence
  Synthetic
ccggggaucucc

SEQ ID NO: 7702 - RNA, 12 nt, Artificial Sequence
  Synthetic
uccggggaucuc

SEQ ID NO: 7703 - RNA, 12 nt, Artificial Sequence
  Synthetic
cuccggggaucu

SEQ ID NO: 7704 - RNA, 12 nt, Artificial Sequence
  Synthetic
gcuccggggauc

SEQ ID NO: 7705 - RNA, 12 nt, Artificial Sequence
  Synthetic
ggcuccggggau

SEQ ID NO: 7706 - RNA, 12 nt, Artificial Sequence
  Synthetic
gggcuccgggga

SEQ ID NO: 7707 - RNA, 12 nt, Artificial Sequence
  Synthetic
ggggcuccgggg

SEQ ID NO: 7708 - RNA, 12 nt, Artificial Sequence
  Synthetic
gggggcuccggg

SEQ ID NO: 7709 - RNA, 12 nt, Artificial Sequence
  Synthetic
ggggggcuccgg

SEQ ID NO: 7710 - RNA, 12 nt, Artificial Sequence
  Synthetic
aggggggcuccg

SEQ ID NO: 7711 - RNA, 12 nt, Artificial Sequence
  Synthetic
aaggggggcucc

SEQ ID NO: 7712 - RNA, 12 nt, Artificial Sequence
  Synthetic
gaaggggggcuc

SEQ ID NO: 7713 - RNA, 12 nt, Artificial Sequence
  Synthetic
ggaaggggggcu

SEQ ID NO: 7714 - RNA, 12 nt, Artificial Sequence
  Synthetic
aggaaggggggc

SEQ ID NO: 7715 - RNA, 12 nt, Artificial Sequence
  Synthetic
caggaagggggg

SEQ ID NO: 7716 - RNA, 12 nt, Artificial Sequence
  Synthetic
gcaggaaggggg

SEQ ID NO: 7717 - RNA, 12 nt, Artificial Sequence
  Synthetic
cgcaggaagggg

SEQ ID NO: 7718 - RNA, 12 nt, Artificial Sequence
  Synthetic
gcgcaggaaggg

SEQ ID NO: 7719 - RNA, 12 nt, Artificial Sequence
  Synthetic
ggcgcaggaagg

SEQ ID NO: 7720 - RNA, 12 nt, Artificial Sequence
  Synthetic
uggcgcaggaag

SEQ ID NO: 7721 - RNA, 12 nt, Artificial Sequence
  Synthetic
cuggcgcaggaa

SEQ ID NO: 7722 - RNA, 12 nt, Artificial Sequence
  Synthetic
gcuggcgcagga

SEQ ID NO: 7723 - RNA, 12 nt, Artificial Sequence
  Synthetic
ggcuggcgcagg

SEQ ID NO: 7724 - RNA, 12 nt, Artificial Sequence
  Synthetic
uggcuggcgcag

SEQ ID NO: 7725 - RNA, 12 nt, Artificial Sequence
  Synthetic
auggcuggcgca

SEQ ID NO: 7726 - RNA, 12 nt, Artificial Sequence
  Synthetic
cauggcuggcgc

SEQ ID NO: 7727 - RNA, 12 nt, Artificial Sequence
  Synthetic
gcauggcuggcg

SEQ ID NO: 7728 - RNA, 12 nt, Artificial Sequence
  Synthetic
ggcauggcuggc

SEQ ID NO: 7729 - RNA, 12 nt, Artificial Sequence
  Synthetic
aggcauggcugg

SEQ ID NO: 7730 - RNA, 12 nt, Artificial Sequence
  Synthetic
aaggcauggcug

SEQ ID NO: 7731 - RNA, 12 nt, Artificial Sequence
  Synthetic
aaaggcauggcu

SEQ ID NO: 7732 - RNA, 12 nt, Artificial Sequence
  Synthetic
uaaaggcauggc

SEQ ID NO: 7733 - RNA, 12 nt, Artificial Sequence
  Synthetic
uuaaaggcaugg

SEQ ID NO: 7734 - RNA, 12 nt, Artificial Sequence
  Synthetic
uuuaaaggcaug

SEQ ID NO: 7735 - RNA, 12 nt, Artificial Sequence
  Synthetic
guuuaaaggcau

SEQ ID NO: 7736 - RNA, 12 nt, Artificial Sequence
  Synthetic
gguuuaaaggca

SEQ ID NO: 7737 - RNA, 12 nt, Artificial Sequence
  Synthetic
cgguuuaaaggc

SEQ ID NO: 7738 - RNA, 12 nt, Artificial Sequence
  Synthetic
gcgguuuaaagg

SEQ ID NO: 7739 - RNA, 12 nt, Artificial Sequence
  Synthetic
ugcgguuuaaag

SEQ ID NO: 7740 - RNA, 12 nt, Artificial Sequence
  Synthetic
gugcgguuuaaa

SEQ ID NO: 7741 - RNA, 12 nt, Artificial Sequence
  Synthetic
agugcgguuuaa

SEQ ID NO: 7742 - RNA, 12 nt, Artificial Sequence
  Synthetic
aagugcgguuua

SEQ ID NO: 7743 - RNA, 12 nt, Artificial Sequence
  Synthetic
aaagugcgguuu

SEQ ID NO: 7744 - RNA, 12 nt, Artificial Sequence
  Synthetic
caaagugcgguu

SEQ ID NO: 7745 - RNA, 12 nt, Artificial Sequence
  Synthetic
acaaagugcggu

SEQ ID NO: 7746 - RNA, 12 nt, Artificial Sequence
  Synthetic
gacaaagugcgg

SEQ ID NO: 7747 - RNA, 12 nt, Artificial Sequence
  Synthetic
ggacaaagugcg

SEQ ID NO: 7748 - RNA, 12 nt, Artificial Sequence
  Synthetic
uggacaaagugc

SEQ ID NO: 7749 - RNA, 12 nt, Artificial Sequence
  Synthetic
auggacaaagug

SEQ ID NO: 7750 - RNA, 12 nt, Artificial Sequence
  Synthetic
cauggacaaagu

SEQ ID NO: 7751 - RNA, 12 nt, Artificial Sequence
  Synthetic
acauggacaaag

SEQ ID NO: 7752 - RNA, 12 nt, Artificial Sequence
  Synthetic
gacauggacaaa

SEQ ID NO: 7753 - RNA, 12 nt, Artificial Sequence
  Synthetic
ggacauggacaa

SEQ ID NO: 7754 - RNA, 12 nt, Artificial Sequence
  Synthetic
aggacauggaca

SEQ ID NO: 7755 - RNA, 12 nt, Artificial Sequence
  Synthetic
gaggacauggac

SEQ ID NO: 7756 - RNA, 12 nt, Artificial Sequence
  Synthetic
ugaggacaugga

SEQ ID NO: 7757 - RNA, 12 nt, Artificial Sequence
  Synthetic
gugaggacaugg

SEQ ID NO: 7758 - RNA, 12 nt, Artificial Sequence
  Synthetic
agugaggacaug

SEQ ID NO: 7759 - RNA, 12 nt, Artificial Sequence
  Synthetic
cagugaggacau

SEQ ID NO: 7760 - RNA, 12 nt, Artificial Sequence
  Synthetic
gcagugaggaca

SEQ ID NO: 7761 - RNA, 12 nt, Artificial Sequence
  Synthetic
ggcagugaggac

SEQ ID NO: 7762 - RNA, 12 nt, Artificial Sequence
  Synthetic
uggcagugagga

SEQ ID NO: 7763 - RNA, 12 nt, Artificial Sequence
  Synthetic
cuggcagugagg

SEQ ID NO: 7764 - RNA, 12 nt, Artificial Sequence
  Synthetic
ccuggcagugag

SEQ ID NO: 7765 - RNA, 12 nt, Artificial Sequence
  Synthetic
uccuggcaguga

SEQ ID NO: 7766 - RNA, 12 nt, Artificial Sequence
  Synthetic
guccuggcagug

SEQ ID NO: 7767 - RNA, 12 nt, Artificial Sequence
  Synthetic
aguccuggcagu

SEQ ID NO: 7768 - RNA, 12 nt, Artificial Sequence
  Synthetic
caguccuggcag

SEQ ID NO: 7769 - RNA, 12 nt, Artificial Sequence
  Synthetic
ccaguccuggca

SEQ ID NO: 7770 - RNA, 12 nt, Artificial Sequence
  Synthetic
uccaguccuggc

SEQ ID NO: 7771 - RNA, 12 nt, Artificial Sequence
  Synthetic
cuccaguccugg

SEQ ID NO: 7772 - RNA, 12 nt, Artificial Sequence
  Synthetic
ccuccaguccug

SEQ ID NO: 7773 - RNA, 12 nt, Artificial Sequence
  Synthetic
uccuccaguccu

SEQ ID NO: 7774 - RNA, 12 nt, Artificial Sequence
  Synthetic
guccuccagucc

SEQ ID NO: 7775 - RNA, 12 nt, Artificial Sequence
  Synthetic
aguccuccaguc

SEQ ID NO: 7776 - RNA, 12 nt, Artificial Sequence
  Synthetic
caguccuccagu

SEQ ID NO: 7777 - RNA, 12 nt, Artificial Sequence
  Synthetic
ccaguccuccag

SEQ ID NO: 7778 - RNA, 12 nt, Artificial Sequence
  Synthetic
cccaguccucca

SEQ ID NO: 7779 - RNA, 12 nt, Artificial Sequence
  Synthetic
ucccaguccucc

SEQ ID NO: 7780 - RNA, 12 nt, Artificial Sequence
  Synthetic
cucccaguccuc

SEQ ID NO: 7781 - RNA, 12 nt, Artificial Sequence
  Synthetic
ccucccaguccu

SEQ ID NO: 7782 - RNA, 12 nt, Artificial Sequence
  Synthetic
uccucccagucc

SEQ ID NO: 7783 - RNA, 12 nt, Artificial Sequence
  Synthetic
auccucccaguc

SEQ ID NO: 7784 - RNA, 12 nt, Artificial Sequence
  Synthetic
cauccucccagu

SEQ ID NO: 7785 - RNA, 12 nt, Artificial Sequence
  Synthetic
ucauccucccag

SEQ ID NO: 7786 - RNA, 12 nt, Artificial Sequence
  Synthetic
uucauccuccca

SEQ ID NO: 7787 - RNA, 12 nt, Artificial Sequence
  Synthetic
auucauccuccc

SEQ ID NO: 7788 - RNA, 12 nt, Artificial Sequence
  Synthetic
aauucauccucc

SEQ ID NO: 7789 - RNA, 12 nt, Artificial Sequence
  Synthetic
gaauucauccuc

SEQ ID NO: 7790 - RNA, 12 nt, Artificial Sequence
  Synthetic
cgaauucauccu

SEQ ID NO: 7791 - RNA, 12 nt, Artificial Sequence
  Synthetic
ucgaauucaucc

SEQ ID NO: 7792 - RNA, 12 nt, Artificial Sequence
  Synthetic
gucgaauucauc

SEQ ID NO: 7793 - RNA, 12 nt, Artificial Sequence
  Synthetic
ggucgaauucau

SEQ ID NO: 7794 - RNA, 12 nt, Artificial Sequence
  Synthetic
aggucgaauuca

SEQ ID NO: 7795 - RNA, 12 nt, Artificial Sequence
  Synthetic
caggucgaauuc

SEQ ID NO: 7796 - RNA, 12 nt, Artificial Sequence
  Synthetic
ccaggucgaauu

SEQ ID NO: 7797 - RNA, 12 nt, Artificial Sequence
  Synthetic
uccaggucgaau

SEQ ID NO: 7798 - RNA, 12 nt, Artificial Sequence
  Synthetic
cuccaggucgaa

SEQ ID NO: 7799 - RNA, 12 nt, Artificial Sequence
  Synthetic
ucuccaggucga

SEQ ID NO: 7800 - RNA, 12 nt, Artificial Sequence
  Synthetic
uucuccaggucg

SEQ ID NO: 7801 - RNA, 12 nt, Artificial Sequence
  Synthetic
guucuccagguc

SEQ ID NO: 7802 - RNA, 12 nt, Artificial Sequence
  Synthetic
cguucuccaggu

SEQ ID NO: 7803 - RNA, 12 nt, Artificial Sequence
  Synthetic
gcguucuccagg

SEQ ID NO: 7804 - RNA, 12 nt, Artificial Sequence
  Synthetic
ugcguucuccag

SEQ ID NO: 7805 - RNA, 12 nt, Artificial Sequence
  Synthetic
cugcguucucca

SEQ ID NO: 7806 - RNA, 12 nt, Artificial Sequence
  Synthetic
acugcguucucc

SEQ ID NO: 7807 - RNA, 12 nt, Artificial Sequence
  Synthetic
cacugcguucuc

SEQ ID NO: 7808 - RNA, 12 nt, Artificial Sequence
  Synthetic
gcacugcguucu

SEQ ID NO: 7809 - RNA, 12 nt, Artificial Sequence
  Synthetic
agcacugcguuc

SEQ ID NO: 7810 - RNA, 12 nt, Artificial Sequence
  Synthetic
gagcacugcguu

SEQ ID NO: 7811 - RNA, 12 nt, Artificial Sequence
  Synthetic
agagcacugcgu

SEQ ID NO: 7812 - RNA, 12 nt, Artificial Sequence
  Synthetic
aagagcacugcg

SEQ ID NO: 7813 - RNA, 12 nt, Artificial Sequence
  Synthetic
gaagagcacugc

SEQ ID NO: 7814 - RNA, 12 nt, Artificial Sequence
  Synthetic
cgaagagcacug

SEQ ID NO: 7815 - RNA, 12 nt, Artificial Sequence
  Synthetic
ucgaagagcacu

SEQ ID NO: 7816 - RNA, 12 nt, Artificial Sequence
  Synthetic
uucgaagagcac

SEQ ID NO: 7817 - RNA, 12 nt, Artificial Sequence
  Synthetic
cuucgaagagca

SEQ ID NO: 7818 - RNA, 12 nt, Artificial Sequence
  Synthetic
acuucgaagagc

SEQ ID NO: 7819 - RNA, 12 nt, Artificial Sequence
  Synthetic
cacuucgaagag

SEQ ID NO: 7820 - RNA, 12 nt, Artificial Sequence
  Synthetic
ccacuucgaaga

SEQ ID NO: 7821 - RNA, 12 nt, Artificial Sequence
  Synthetic
gccacuucgaag

SEQ ID NO: 7822 - RNA, 12 nt, Artificial Sequence
  Synthetic
ggccacuucgaa

SEQ ID NO: 7823 - RNA, 12 nt, Artificial Sequence
  Synthetic
aggccacuucga

SEQ ID NO: 7824 - RNA, 12 nt, Artificial Sequence
  Synthetic
caggccacuucg

SEQ ID NO: 7825 - RNA, 12 nt, Artificial Sequence
  Synthetic
ccaggccacuuc

SEQ ID NO: 7826 - RNA, 12 nt, Artificial Sequence
  Synthetic
cccaggccacuu

SEQ ID NO: 7827 - RNA, 12 nt, Artificial Sequence
  Synthetic
ucccaggccacu

SEQ ID NO: 7828 - RNA, 12 nt, Artificial Sequence
  Synthetic
cucccaggccac

SEQ ID NO: 7829 - RNA, 12 nt, Artificial Sequence
  Synthetic
ccucccaggcca

SEQ ID NO: 7830 - RNA, 12 nt, Artificial Sequence
  Synthetic
accucccaggcc

SEQ ID NO: 7831 - RNA, 12 nt, Artificial Sequence
  Synthetic
caccucccaggc

SEQ ID NO: 7832 - RNA, 12 nt, Artificial Sequence
  Synthetic
ccaccucccagg

SEQ ID NO: 7833 - RNA, 12 nt, Artificial Sequence
  Synthetic
gccaccucccag

SEQ ID NO: 7834 - RNA, 12 nt, Artificial Sequence
  Synthetic
agccaccuccca

SEQ ID NO: 7835 - RNA, 12 nt, Artificial Sequence
  Synthetic
uagccaccuccc

SEQ ID NO: 7836 - RNA, 12 nt, Artificial Sequence
  Synthetic
uuagccaccucc

SEQ ID NO: 7837 - RNA, 12 nt, Artificial Sequence
  Synthetic
guuagccaccuc

SEQ ID NO: 7838 - RNA, 12 nt, Artificial Sequence
  Synthetic
uguuagccaccu

SEQ ID NO: 7839 - RNA, 12 nt, Artificial Sequence
  Synthetic
uuguuagccacc

SEQ ID NO: 7840 - RNA, 12 nt, Artificial Sequence
  Synthetic
cuuguuagccac

SEQ ID NO: 7841 - RNA, 12 nt, Artificial Sequence
  Synthetic
ccuuguuagcca

SEQ ID NO: 7842 - RNA, 12 nt, Artificial Sequence
  Synthetic
accuuguuagcc

SEQ ID NO: 7843 - RNA, 12 nt, Artificial Sequence
  Synthetic
caccuuguuagc

SEQ ID NO: 7844 - RNA, 12 nt, Artificial Sequence
  Synthetic
ccaccuuguuag

SEQ ID NO: 7845 - RNA, 12 nt, Artificial Sequence
  Synthetic
cccaccuuguua

SEQ ID NO: 7846 - RNA, 12 nt, Artificial Sequence
  Synthetic
acccaccuuguu

SEQ ID NO: 7847 - RNA, 12 nt, Artificial Sequence
  Synthetic
cacccaccuugu

SEQ ID NO: 7848 - RNA, 12 nt, Artificial Sequence
  Synthetic
ccacccaccuug

SEQ ID NO: 7849 - RNA, 12 nt, Artificial Sequence
  Synthetic
gccacccaccuu

SEQ ID NO: 7850 - RNA, 12 nt, Artificial Sequence
  Synthetic
ugccacccaccu

SEQ ID NO: 7851 - RNA, 12 nt, Artificial Sequence
  Synthetic
augccacccacc

SEQ ID NO: 7852 - RNA, 12 nt, Artificial Sequence
  Synthetic
gaugccacccac

SEQ ID NO: 7853 - RNA, 12 nt, Artificial Sequence
  Synthetic
agaugccaccca

SEQ ID NO: 7854 - RNA, 12 nt, Artificial Sequence
  Synthetic
uagaugccaccc

SEQ ID NO: 7855 - RNA, 12 nt, Artificial Sequence
  Synthetic
guagaugccacc

SEQ ID NO: 7856 - RNA, 12 nt, Artificial Sequence
  Synthetic
uguagaugccac

SEQ ID NO: 7857 - RNA, 12 nt, Artificial Sequence
  Synthetic
guguagaugcca

SEQ ID NO: 7858 - RNA, 12 nt, Artificial Sequence
  Synthetic
cguguagaugcc

SEQ ID NO: 7859 - RNA, 12 nt, Artificial Sequence
  Synthetic
ccguguagaugc

SEQ ID NO: 7860 - RNA, 12 nt, Artificial Sequence
  Synthetic
accguguagaug

SEQ ID NO: 7861 - RNA, 12 nt, Artificial Sequence
  Synthetic
caccguguagau

SEQ ID NO: 7862 - RNA, 12 nt, Artificial Sequence
  Synthetic
gcaccguguaga

SEQ ID NO: 7863 - RNA, 12 nt, Artificial Sequence
  Synthetic
agcaccguguag

SEQ ID NO: 7864 - RNA, 12 nt, Artificial Sequence
  Synthetic
cagcaccgugua

SEQ ID NO: 7865 - RNA, 12 nt, Artificial Sequence
  Synthetic
gcagcaccgugu

SEQ ID NO: 7866 - RNA, 12 nt, Artificial Sequence
  Synthetic
ugcagcaccgug

SEQ ID NO: 7867 - RNA, 12 nt, Artificial Sequence
  Synthetic
cugcagcaccgu

SEQ ID NO: 7868 - RNA, 12 nt, Artificial Sequence
  Synthetic
ucugcagcaccg

SEQ ID NO: 7869 - RNA, 12 nt, Artificial Sequence
  Synthetic
gucugcagcacc

SEQ ID NO: 7870 - RNA, 12 nt, Artificial Sequence
  Synthetic
cgucugcagcac

SEQ ID NO: 7871 - RNA, 12 nt, Artificial Sequence
  Synthetic
ucgucugcagca

SEQ ID NO: 7872 - RNA, 12 nt, Artificial Sequence
  Synthetic
uucgucugcagc

SEQ ID NO: 7873 - RNA, 12 nt, Artificial Sequence
  Synthetic
cuucgucugcag

SEQ ID NO: 7874 - RNA, 12 nt, Artificial Sequence
  Synthetic
ccuucgucugca

SEQ ID NO: 7875 - RNA, 12 nt, Artificial Sequence
  Synthetic
gccuucgucugc

SEQ ID NO: 7876 - RNA, 12 nt, Artificial Sequence
  Synthetic
cgccuucgucug

SEQ ID NO: 7877 - RNA, 12 nt, Artificial Sequence
  Synthetic
ucgccuucgucu

SEQ ID NO: 7878 - RNA, 12 nt, Artificial Sequence
  Synthetic
uucgccuucguc

SEQ ID NO: 7879 - RNA, 12 nt, Artificial Sequence
  Synthetic
cuucgccuucgu

SEQ ID NO: 7880 - RNA, 12 nt, Artificial Sequence
  Synthetic
ccuucgccuucg

SEQ ID NO: 7881 - RNA, 12 nt, Artificial Sequence
  Synthetic
accuucgccuuc

SEQ ID NO: 7882 - RNA, 12 nt, Artificial Sequence
  Synthetic
caccuucgccuu

SEQ ID NO: 7883 - RNA, 12 nt, Artificial Sequence
  Synthetic
ucaccuucgccu

SEQ ID NO: 7884 - RNA, 12 nt, Artificial Sequence
  Synthetic
gucaccuucgcc

SEQ ID NO: 7885 - RNA, 12 nt, Artificial Sequence
  Synthetic
ugucaccuucgc

SEQ ID NO: 7886 - RNA, 12 nt, Artificial Sequence
  Synthetic
cugucaccuucg

SEQ ID NO: 7887 - RNA, 12 nt, Artificial Sequence
  Synthetic
ccugucaccuuc

SEQ ID NO: 7888 - RNA, 12 nt, Artificial Sequence
  Synthetic
cccugucaccuu

SEQ ID NO: 7889 - RNA, 12 nt, Artificial Sequence
  Synthetic
ccccugucaccu

SEQ ID NO: 7890 - RNA, 12 nt, Artificial Sequence
  Synthetic
uccccugucacc

SEQ ID NO: 7891 - RNA, 12 nt, Artificial Sequence
  Synthetic
guccccugucac

SEQ ID NO: 7892 - RNA, 12 nt, Artificial Sequence
  Synthetic
cguccccuguca

SEQ ID NO: 7893 - RNA, 12 nt, Artificial Sequence
  Synthetic
ucguccccuguc

SEQ ID NO: 7894 - RNA, 12 nt, Artificial Sequence
  Synthetic
uucguccccugu

SEQ ID NO: 7895 - RNA, 12 nt, Artificial Sequence
  Synthetic
auucguccccug

SEQ ID NO: 7896 - RNA, 12 nt, Artificial Sequence
  Synthetic
cauucguccccu

SEQ ID NO: 7897 - RNA, 12 nt, Artificial Sequence
  Synthetic
ccauucgucccc

SEQ ID NO: 7898 - RNA, 12 nt, Artificial Sequence
  Synthetic
cccauucguccc

SEQ ID NO: 7899 - RNA, 12 nt, Artificial Sequence
  Synthetic
ccccauucgucc

SEQ ID NO: 7900 - RNA, 12 nt, Artificial Sequence
  Synthetic
gccccauucguc

SEQ ID NO: 7901 - RNA, 12 nt, Artificial Sequence
  Synthetic
cgccccauucgu

SEQ ID NO: 7902 - RNA, 12 nt, Artificial Sequence
  Synthetic
ucgccccauucg

SEQ ID NO: 7903 - RNA, 12 nt, Artificial Sequence
  Synthetic
gucgccccauuc

SEQ ID NO: 7904 - RNA, 12 nt, Artificial Sequence
  Synthetic
ugucgccccauu

SEQ ID NO: 7905 - RNA, 12 nt, Artificial Sequence
  Synthetic
uugucgccccau

SEQ ID NO: 7906 - RNA, 12 nt, Artificial Sequence
  Synthetic
guugucgcccca

SEQ ID NO: 7907 - RNA, 12 nt, Artificial Sequence
  Synthetic
aguugucgcccc

SEQ ID NO: 7908 - RNA, 12 nt, Artificial Sequence
  Synthetic
uaguugucgccc

SEQ ID NO: 7909 - RNA, 12 nt, Artificial Sequence
  Synthetic
guaguugucgcc

SEQ ID NO: 7910 - RNA, 12 nt, Artificial Sequence
  Synthetic
aguaguugucgc

SEQ ID NO: 7911 - RNA, 12 nt, Artificial Sequence
  Synthetic
aaguaguugucg

SEQ ID NO: 7912 - RNA, 12 nt, Artificial Sequence
  Synthetic
gaaguaguuguc

SEQ ID NO: 7913 - RNA, 12 nt, Artificial Sequence
  Synthetic
ggaaguaguugu

SEQ ID NO: 7914 - RNA, 12 nt, Artificial Sequence
  Synthetic
aggaaguaguug

SEQ ID NO: 7915 - RNA, 12 nt, Artificial Sequence
  Synthetic
caggaaguaguu

SEQ ID NO: 7916 - RNA, 12 nt, Artificial Sequence
  Synthetic
ccaggaaguagu

SEQ ID NO: 7917 - RNA, 12 nt, Artificial Sequence
  Synthetic
accaggaaguag

SEQ ID NO: 7918 - RNA, 12 nt, Artificial Sequence
  Synthetic
caccaggaagua

SEQ ID NO: 7919 - RNA, 12 nt, Artificial Sequence
  Synthetic
ccaccaggaagu

SEQ ID NO: 7920 - RNA, 12 nt, Artificial Sequence
  Synthetic
cccaccaggaag

SEQ ID NO: 7921 - RNA, 12 nt, Artificial Sequence
  Synthetic
ccccaccaggaa

SEQ ID NO: 7922 - RNA, 12 nt, Artificial Sequence
  Synthetic
gccccaccagga

SEQ ID NO: 7923 - RNA, 12 nt, Artificial Sequence
  Synthetic
ggccccaccagg

SEQ ID NO: 7924 - RNA, 12 nt, Artificial Sequence
  Synthetic
cggccccaccag

SEQ ID NO: 7925 - RNA, 12 nt, Artificial Sequence
  Synthetic
acggccccacca

SEQ ID NO: 7926 - RNA, 12 nt, Artificial Sequence
  Synthetic
uacggccccacc

SEQ ID NO: 7927 - RNA, 12 nt, Artificial Sequence
  Synthetic
guacggccccac

SEQ ID NO: 7928 - RNA, 12 nt, Artificial Sequence
  Synthetic
uguacggcccca

SEQ ID NO: 7929 - RNA, 12 nt, Artificial Sequence
  Synthetic
guguacggcccc

SEQ ID NO: 7930 - RNA, 12 nt, Artificial Sequence
  Synthetic
cguguacggccc

SEQ ID NO: 7931 - RNA, 12 nt, Artificial Sequence
  Synthetic
ccguguacggcc

SEQ ID NO: 7932 - RNA, 12 nt, Artificial Sequence
  Synthetic
uccguguacggc

SEQ ID NO: 7933 - RNA, 12 nt, Artificial Sequence
  Synthetic
cuccguguacgg

SEQ ID NO: 7934 - RNA, 12 nt, Artificial Sequence
  Synthetic
gcuccguguacg

SEQ ID NO: 7935 - RNA, 12 nt, Artificial Sequence
  Synthetic
ugcuccguguac

SEQ ID NO: 7936 - RNA, 12 nt, Artificial Sequence
  Synthetic
cugcuccgugua

SEQ ID NO: 7937 - RNA, 12 nt, Artificial Sequence
  Synthetic
ccugcuccgugu

SEQ ID NO: 7938 - RNA, 12 nt, Artificial Sequence
  Synthetic
cccugcuccgug

SEQ ID NO: 7939 - RNA, 12 nt, Artificial Sequence
  Synthetic
gcccugcuccgu

SEQ ID NO: 7940 - RNA, 12 nt, Artificial Sequence
  Synthetic
cgcccugcuccg

SEQ ID NO: 7941 - RNA, 12 nt, Artificial Sequence
  Synthetic
acgcccugcucc

SEQ ID NO: 7942 - RNA, 12 nt, Artificial Sequence
  Synthetic
cacgcccugcuc

SEQ ID NO: 7943 - RNA, 12 nt, Artificial Sequence
  Synthetic
ucacgcccugcu

SEQ ID NO: 7944 - RNA, 12 nt, Artificial Sequence
  Synthetic
cucacgcccugc

SEQ ID NO: 7945 - RNA, 12 nt, Artificial Sequence
  Synthetic
ccucacgcccug

SEQ ID NO: 7946 - RNA, 12 nt, Artificial Sequence
  Synthetic
uccucacgcccu

SEQ ID NO: 7947 - RNA, 12 nt, Artificial Sequence
  Synthetic
guccucacgccc

SEQ ID NO: 7948 - RNA, 12 nt, Artificial Sequence
  Synthetic
gguccucacgcc

SEQ ID NO: 7949 - RNA, 12 nt, Artificial Sequence
  Synthetic
ggguccucacgc

SEQ ID NO: 7950 - RNA, 12 nt, Artificial Sequence
  Synthetic
uggguccucacg

SEQ ID NO: 7951 - RNA, 12 nt, Artificial Sequence
  Synthetic
cuggguccucac

SEQ ID NO: 7952 - RNA, 12 nt, Artificial Sequence
  Synthetic
ccuggguccuca

SEQ ID NO: 7953 - RNA, 12 nt, Artificial Sequence
  Synthetic
accuggguccuc

SEQ ID NO: 7954 - RNA, 12 nt, Artificial Sequence
  Synthetic
caccuggguccu

SEQ ID NO: 7955 - RNA, 12 nt, Artificial Sequence
  Synthetic
ccaccugggucc

SEQ ID NO: 7956 - RNA, 12 nt, Artificial Sequence
  Synthetic
uccaccuggguc

SEQ ID NO: 7957 - RNA, 12 nt, Artificial Sequence
  Synthetic
uuccaccugggu

SEQ ID NO: 7958 - RNA, 12 nt, Artificial Sequence
  Synthetic
guuccaccuggg

SEQ ID NO: 7959 - RNA, 12 nt, Artificial Sequence
  Synthetic
aguuccaccugg

SEQ ID NO: 7960 - RNA, 12 nt, Artificial Sequence
  Synthetic
caguuccaccug

SEQ ID NO: 7961 - RNA, 12 nt, Artificial Sequence
  Synthetic
gcaguuccaccu

SEQ ID NO: 7962 - RNA, 12 nt, Artificial Sequence
  Synthetic
agcaguuccacc

SEQ ID NO: 7963 - RNA, 12 nt, Artificial Sequence
  Synthetic
cagcaguuccac

SEQ ID NO: 7964 - RNA, 12 nt, Artificial Sequence
  Synthetic
ccagcaguucca

SEQ ID NO: 7965 - RNA, 12 nt, Artificial Sequence
  Synthetic
uccagcaguucc

SEQ ID NO: 7966 - RNA, 12 nt, Artificial Sequence
  Synthetic
cuccagcaguuc

SEQ ID NO: 7967 - RNA, 12 nt, Artificial Sequence
  Synthetic
ccuccagcaguu

SEQ ID NO: 7968 - RNA, 12 nt, Artificial Sequence
  Synthetic
gccuccagcagu

SEQ ID NO: 7969 - RNA, 12 nt, Artificial Sequence
  Synthetic
ggccuccagcag

SEQ ID NO: 7970 - RNA, 12 nt, Artificial Sequence
  Synthetic
gggccuccagca

SEQ ID NO: 7971 - RNA, 12 nt, Artificial Sequence
  Synthetic
ggggccuccagc

SEQ ID NO: 7972 - RNA, 12 nt, Artificial Sequence
  Synthetic
gggggccuccag

SEQ ID NO: 7973 - RNA, 12 nt, Artificial Sequence
  Synthetic
ugggggccucca

SEQ ID NO: 7974 - RNA, 12 nt, Artificial Sequence
  Synthetic
gugggggccucc

SEQ ID NO: 7975 - RNA, 12 nt, Artificial Sequence
  Synthetic
ggugggggccuc

SEQ ID NO: 7976 - RNA, 12 nt, Artificial Sequence
  Synthetic
gggugggggccu

SEQ ID NO: 7977 - RNA, 12 nt, Artificial Sequence
  Synthetic
ggggugggggcc

SEQ ID NO: 7978 - RNA, 12 nt, Artificial Sequence
  Synthetic
cggggugggggc

SEQ ID NO: 7979 - RNA, 12 nt, Artificial Sequence
  Synthetic
ccgggguggggg

SEQ ID NO: 7980 - RNA, 12 nt, Artificial Sequence
  Synthetic
gccggggugggg

SEQ ID NO: 7981 - RNA, 12 nt, Artificial Sequence
  Synthetic
ggccgggguggg

SEQ ID NO: 7982 - RNA, 12 nt, Artificial Sequence
  Synthetic
gggccggggugg

SEQ ID NO: 7983 - RNA, 12 nt, Artificial Sequence
  Synthetic
agggccggggug

SEQ ID NO: 7984 - RNA, 12 nt, Artificial Sequence
  Synthetic
cagggccggggu

SEQ ID NO: 7985 - RNA, 12 nt, Artificial Sequence
  Synthetic
ucagggccgggg

SEQ ID NO: 7986 - RNA, 12 nt, Artificial Sequence
  Synthetic
uucagggccggg

SEQ ID NO: 7987 - RNA, 12 nt, Artificial Sequence
  Synthetic
cuucagggccgg

SEQ ID NO: 7988 - RNA, 12 nt, Artificial Sequence
  Synthetic
ucuucagggccg

SEQ ID NO: 7989 - RNA, 12 nt, Artificial Sequence
  Synthetic
cucuucagggcc

SEQ ID NO: 7990 - RNA, 12 nt, Artificial Sequence
  Synthetic
ccucuucagggc

SEQ ID NO: 7991 - RNA, 12 nt, Artificial Sequence
  Synthetic
uccucuucaggg

SEQ ID NO: 7992 - RNA, 12 nt, Artificial Sequence
  Synthetic
guccucuucagg

SEQ ID NO: 7993 - RNA, 12 nt, Artificial Sequence
  Synthetic
uguccucuucag

SEQ ID NO: 7994 - RNA, 12 nt, Artificial Sequence
  Synthetic
guguccucuuca

SEQ ID NO: 7995 - RNA, 12 nt, Artificial Sequence
  Synthetic
aguguccucuuc

SEQ ID NO: 7996 - RNA, 12 nt, Artificial Sequence
  Synthetic
caguguccucuu

SEQ ID NO: 7997 - RNA, 12 nt, Artificial Sequence
  Synthetic
ccaguguccucu

SEQ ID NO: 7998 - RNA, 12 nt, Artificial Sequence
  Synthetic
uccaguguccuc

SEQ ID NO: 7999 - RNA, 12 nt, Artificial Sequence
  Synthetic
auccaguguccu

SEQ ID NO: 8000 - RNA, 12 nt, Artificial Sequence
  Synthetic
aauccagugucc

SEQ ID NO: 8001 - RNA, 12 nt, Artificial Sequence
  Synthetic
gaauccaguguc

SEQ ID NO: 8002 - RNA, 12 nt, Artificial Sequence
  Synthetic
ggaauccagugu

SEQ ID NO: 8003 - RNA, 12 nt, Artificial Sequence
  Synthetic
uggaauccagug

SEQ ID NO: 8004 - RNA, 12 nt, Artificial Sequence
  Synthetic
auggaauccagu

SEQ ID NO: 8005 - RNA, 12 nt, Artificial Sequence
  Synthetic
cauggaauccag

SEQ ID NO: 8006 - RNA, 12 nt, Artificial Sequence
  Synthetic
ucauggaaucca

SEQ ID NO: 8007 - RNA, 12 nt, Artificial Sequence
  Synthetic
uucauggaaucc

SEQ ID NO: 8008 - RNA, 12 nt, Artificial Sequence
  Synthetic
guucauggaauc

SEQ ID NO: 8009 - RNA, 12 nt, Artificial Sequence
  Synthetic
uguucauggaau

SEQ ID NO: 8010 - RNA, 12 nt, Artificial Sequence
  Synthetic
cuguucauggaa

SEQ ID NO: 8011 - RNA, 12 nt, Artificial Sequence
  Synthetic
gcuguucaugga

SEQ ID NO: 8012 - RNA, 12 nt, Artificial Sequence
  Synthetic
ugcuguucaugg

SEQ ID NO: 8013 - RNA, 12 nt, Artificial Sequence
  Synthetic
uugcuguucaug

SEQ ID NO: 8014 - RNA, 12 nt, Artificial Sequence
  Synthetic
cuugcuguucau

SEQ ID NO: 8015 - RNA, 12 nt, Artificial Sequence
  Synthetic
ccuugcuguuca

SEQ ID NO: 8016 - RNA, 12 nt, Artificial Sequence
  Synthetic
cccuugcuguuc

SEQ ID NO: 8017 - RNA, 12 nt, Artificial Sequence
  Synthetic
gcccuugcuguu

SEQ ID NO: 8018 - RNA, 12 nt, Artificial Sequence
  Synthetic
agcccuugcugu

SEQ ID NO: 8019 - RNA, 12 nt, Artificial Sequence
  Synthetic
cagcccuugcug

SEQ ID NO: 8020 - RNA, 12 nt, Artificial Sequence
  Synthetic
gcagcccuugcu

SEQ ID NO: 8021 - RNA, 12 nt, Artificial Sequence
  Synthetic
ugcagcccuugc

SEQ ID NO: 8022 - RNA, 12 nt, Artificial Sequence
  Synthetic
uugcagcccuug

SEQ ID NO: 8023 - RNA, 12 nt, Artificial Sequence
  Synthetic
cuugcagcccuu

SEQ ID NO: 8024 - RNA, 12 nt, Artificial Sequence
  Synthetic
ccuugcagcccu

SEQ ID NO: 8025 - RNA, 12 nt, Artificial Sequence
  Synthetic
accuugcagccc

SEQ ID NO: 8026 - RNA, 12 nt, Artificial Sequence
  Synthetic
caccuugcagcc

SEQ ID NO: 8027 - RNA, 12 nt, Artificial Sequence
  Synthetic
acaccuugcagc

SEQ ID NO: 8028 - RNA, 12 nt, Artificial Sequence
  Synthetic
uacaccuugcag

SEQ ID NO: 8029 - RNA, 12 nt, Artificial Sequence
  Synthetic
auacaccuugca

SEQ ID NO: 8030 - RNA, 12 nt, Artificial Sequence
  Synthetic
aauacaccuugc

SEQ ID NO: 8031 - RNA, 12 nt, Artificial Sequence
  Synthetic
aaauacaccuug

SEQ ID NO: 8032 - RNA, 12 nt, Artificial Sequence
  Synthetic
gaaauacaccuu

SEQ ID NO: 8033 - RNA, 12 nt, Artificial Sequence
  Synthetic
cgaaauacaccu

SEQ ID NO: 8034 - RNA, 12 nt, Artificial Sequence
  Synthetic
ccgaaauacacc

SEQ ID NO: 8035 - RNA, 12 nt, Artificial Sequence
  Synthetic
cccgaaauacac

SEQ ID NO: 8036 - RNA, 12 nt, Artificial Sequence
  Synthetic
gcccgaaauaca

SEQ ID NO: 8037 - RNA, 12 nt, Artificial Sequence
  Synthetic
cgcccgaaauac

SEQ ID NO: 8038 - RNA, 12 nt, Artificial Sequence
  Synthetic
gcgcccgaaaua

SEQ ID NO: 8039 - RNA, 12 nt, Artificial Sequence
  Synthetic
agcgcccgaaau

SEQ ID NO: 8040 - RNA, 12 nt, Artificial Sequence
  Synthetic
cagcgcccgaaa

SEQ ID NO: 8041 - RNA, 12 nt, Artificial Sequence
  Synthetic
ccagcgcccgaa

SEQ ID NO: 8042 - RNA, 12 nt, Artificial Sequence
  Synthetic
gccagcgcccga

SEQ ID NO: 8043 - RNA, 12 nt, Artificial Sequence
  Synthetic
agccagcgcccg

SEQ ID NO: 8044 - RNA, 12 nt, Artificial Sequence
  Synthetic
cagccagcgccc

SEQ ID NO: 8045 - RNA, 12 nt, Artificial Sequence
  Synthetic
ucagccagcgcc

SEQ ID NO: 8046 - RNA, 12 nt, Artificial Sequence
  Synthetic
aucagccagcgc

SEQ ID NO: 8047 - RNA, 12 nt, Artificial Sequence
  Synthetic
gaucagccagcg

SEQ ID NO: 8048 - RNA, 12 nt, Artificial Sequence
  Synthetic
cgaucagccagc

SEQ ID NO: 8049 - RNA, 12 nt, Artificial Sequence
  Synthetic
ucgaucagccag

SEQ ID NO: 8050 - RNA, 12 nt, Artificial Sequence
  Synthetic
cucgaucagcca

SEQ ID NO: 8051 - RNA, 12 nt, Artificial Sequence
  Synthetic
ccucgaucagcc

SEQ ID NO: 8052 - RNA, 12 nt, Artificial Sequence
  Synthetic
cccucgaucagc

SEQ ID NO: 8053 - RNA, 12 nt, Artificial Sequence
  Synthetic
ucccucgaucag

SEQ ID NO: 8054 - RNA, 12 nt, Artificial Sequence
  Synthetic
cucccucgauca

SEQ ID NO: 8055 - RNA, 12 nt, Artificial Sequence
  Synthetic
ccucccucgauc

SEQ ID NO: 8056 - RNA, 12 nt, Artificial Sequence
  Synthetic
gccucccucgau

SEQ ID NO: 8057 - RNA, 12 nt, Artificial Sequence
  Synthetic
ggccucccucga

SEQ ID NO: 8058 - RNA, 12 nt, Artificial Sequence
  Synthetic
gggccucccucg

SEQ ID NO: 8059 - RNA, 12 nt, Artificial Sequence
  Synthetic
agggccucccuc

SEQ ID NO: 8060 - RNA, 12 nt, Artificial Sequence
  Synthetic
gagggccucccu

SEQ ID NO: 8061 - RNA, 12 nt, Artificial Sequence
  Synthetic
agagggccuccc

SEQ ID NO: 8062 - RNA, 12 nt, Artificial Sequence
  Synthetic
cagagggccucc

SEQ ID NO: 8063 - RNA, 12 nt, Artificial Sequence
  Synthetic
ccagagggccuc

SEQ ID NO: 8064 - RNA, 12 nt, Artificial Sequence
  Synthetic
accagagggccu

SEQ ID NO: 8065 - RNA, 12 nt, Artificial Sequence
  Synthetic
caccagagggcc

SEQ ID NO: 8066 - RNA, 12 nt, Artificial Sequence
  Synthetic
ccaccagagggc

SEQ ID NO: 8067 - RNA, 12 nt, Artificial Sequence
  Synthetic
accaccagaggg

SEQ ID NO: 8068 - RNA, 12 nt, Artificial Sequence
  Synthetic
caccaccagagg

SEQ ID NO: 8069 - RNA, 12 nt, Artificial Sequence
  Synthetic
gcaccaccagag

SEQ ID NO: 8070 - RNA, 12 nt, Artificial Sequence
  Synthetic
agcaccaccaga

SEQ ID NO: 8071 - RNA, 12 nt, Artificial Sequence
  Synthetic
gagcaccaccag

SEQ ID NO: 8072 - RNA, 12 nt, Artificial Sequence
  Synthetic
ggagcaccacca

SEQ ID NO: 8073 - RNA, 12 nt, Artificial Sequence
  Synthetic
aggagcaccacc

SEQ ID NO: 8074 - RNA, 12 nt, Artificial Sequence
  Synthetic
caggagcaccac

SEQ ID NO: 8075 - RNA, 12 nt, Artificial Sequence
  Synthetic
ccaggagcacca

SEQ ID NO: 8076 - RNA, 12 nt, Artificial Sequence
  Synthetic
uccaggagcacc

SEQ ID NO: 8077 - RNA, 12 nt, Artificial Sequence
  Synthetic
guccaggagcac

SEQ ID NO: 8078 - RNA, 12 nt, Artificial Sequence
  Synthetic
cguccaggagca

SEQ ID NO: 8079 - RNA, 12 nt, Artificial Sequence
  Synthetic
acguccaggagc

SEQ ID NO: 8080 - RNA, 12 nt, Artificial Sequence
  Synthetic
cacguccaggag

SEQ ID NO: 8081 - RNA, 12 nt, Artificial Sequence
  Synthetic
ccacguccagga

SEQ ID NO: 8082 - RNA, 12 nt, Artificial Sequence
  Synthetic
cccacguccagg

SEQ ID NO: 8083 - RNA, 12 nt, Artificial Sequence
  Synthetic
acccacguccag

SEQ ID NO: 8084 - RNA, 12 nt, Artificial Sequence
  Synthetic
cacccacgucca

SEQ ID NO: 8085 - RNA, 12 nt, Artificial Sequence
  Synthetic
gcacccacgucc

SEQ ID NO: 8086 - RNA, 12 nt, Artificial Sequence
  Synthetic
ggcacccacguc

SEQ ID NO: 8087 - RNA, 12 nt, Artificial Sequence
  Synthetic
aggcacccacgu

SEQ ID NO: 8088 - RNA, 12 nt, Artificial Sequence
  Synthetic
gaggcacccacg

SEQ ID NO: 8089 - RNA, 12 nt, Artificial Sequence
  Synthetic
ugaggcacccac

SEQ ID NO: 8090 - RNA, 12 nt, Artificial Sequence
  Synthetic
cugaggcaccca

SEQ ID NO: 8091 - RNA, 12 nt, Artificial Sequence
  Synthetic
gcugaggcaccc

SEQ ID NO: 8092 - RNA, 12 nt, Artificial Sequence
  Synthetic
agcugaggcacc

SEQ ID NO: 8093 - RNA, 12 nt, Artificial Sequence
  Synthetic
aagcugaggcac

SEQ ID NO: 8094 - RNA, 12 nt, Artificial Sequence
  Synthetic
caagcugaggca

SEQ ID NO: 8095 - RNA, 12 nt, Artificial Sequence
  Synthetic
ccaagcugaggc

SEQ ID NO: 8096 - RNA, 12 nt, Artificial Sequence
  Synthetic
cccaagcugagg

SEQ ID NO: 8097 - RNA, 12 nt, Artificial Sequence
  Synthetic
gcccaagcugag

SEQ ID NO: 8098 - RNA, 12 nt, Artificial Sequence
  Synthetic
ggcccaagcuga

SEQ ID NO: 8099 - RNA, 12 nt, Artificial Sequence
  Synthetic
gggcccaagcug

SEQ ID NO: 8100 - RNA, 12 nt, Artificial Sequence
  Synthetic
agggcccaagcu

SEQ ID NO: 8101 - RNA, 12 nt, Artificial Sequence
  Synthetic
cagggcccaagc

SEQ ID NO: 8102 - RNA, 12 nt, Artificial Sequence
  Synthetic
ccagggcccaag

SEQ ID NO: 8103 - RNA, 12 nt, Artificial Sequence
  Synthetic
uccagggcccaa

SEQ ID NO: 8104 - RNA, 12 nt, Artificial Sequence
  Synthetic
cuccagggccca

SEQ ID NO: 8105 - RNA, 12 nt, Artificial Sequence
  Synthetic
gcuccagggccc

SEQ ID NO: 8106 - RNA, 12 nt, Artificial Sequence
  Synthetic
cgcuccagggcc

SEQ ID NO: 8107 - RNA, 12 nt, Artificial Sequence
  Synthetic
gcgcuccagggc

SEQ ID NO: 8108 - RNA, 12 nt, Artificial Sequence
  Synthetic
agcgcuccaggg

SEQ ID NO: 8109 - RNA, 12 nt, Artificial Sequence
  Synthetic
cagcgcuccagg

SEQ ID NO: 8110 - RNA, 12 nt, Artificial Sequence
  Synthetic
ccagcgcuccag

SEQ ID NO: 8111 - RNA, 12 nt, Artificial Sequence
  Synthetic
uccagcgcucca

SEQ ID NO: 8112 - RNA, 12 nt, Artificial Sequence
  Synthetic
uuccagcgcucc

SEQ ID NO: 8113 - RNA, 12 nt, Artificial Sequence
  Synthetic
cuuccagcgcuc

SEQ ID NO: 8114 - RNA, 12 nt, Artificial Sequence
  Synthetic
ccuuccagcgcu

SEQ ID NO: 8115 - RNA, 12 nt, Artificial Sequence
  Synthetic
cccuuccagcgc

SEQ ID NO: 8116 - RNA, 12 nt, Artificial Sequence
  Synthetic
ucccuuccagcg

SEQ ID NO: 8117 - RNA, 12 nt, Artificial Sequence
  Synthetic
cucccuuccagc

SEQ ID NO: 8118 - RNA, 12 nt, Artificial Sequence
  Synthetic
ucucccuuccag

SEQ ID NO: 8119 - RNA, 12 nt, Artificial Sequence
  Synthetic
cucucccuucca

SEQ ID NO: 8120 - RNA, 12 nt, Artificial Sequence
  Synthetic
gcucucccuucc

SEQ ID NO: 8121 - RNA, 12 nt, Artificial Sequence
  Synthetic
agcucucccuuc

SEQ ID NO: 8122 - RNA, 12 nt, Artificial Sequence
  Synthetic
gagcucucccuu

SEQ ID NO: 8123 - RNA, 12 nt, Artificial Sequence
  Synthetic
agagcucucccu

SEQ ID NO: 8124 - RNA, 12 nt, Artificial Sequence
  Synthetic
cagagcucuccc

SEQ ID NO: 8125 - RNA, 12 nt, Artificial Sequence
  Synthetic
ccagagcucucc

SEQ ID NO: 8126 - RNA, 12 nt, Artificial Sequence
  Synthetic
cccagagcucuc

SEQ ID NO: 8127 - RNA, 12 nt, Artificial Sequence
  Synthetic
ucccagagcucu

SEQ ID NO: 8128 - RNA, 12 nt, Artificial Sequence
  Synthetic
aucccagagcuc

SEQ ID NO: 8129 - RNA, 12 nt, Artificial Sequence
  Synthetic
uaucccagagcu

SEQ ID NO: 8130 - RNA, 12 nt, Artificial Sequence
  Synthetic
guaucccagagc

SEQ ID NO: 8131 - RNA, 12 nt, Artificial Sequence
  Synthetic
gguaucccagag

SEQ ID NO: 8132 - RNA, 12 nt, Artificial Sequence
  Synthetic
agguaucccaga

SEQ ID NO: 8133 - RNA, 12 nt, Artificial Sequence
  Synthetic
cagguaucccag

SEQ ID NO: 8134 - RNA, 12 nt, Artificial Sequence
  Synthetic
gcagguauccca

SEQ ID NO: 8135 - RNA, 12 nt, Artificial Sequence
  Synthetic
ugcagguauccc

SEQ ID NO: 8136 - RNA, 12 nt, Artificial Sequence
  Synthetic
uugcagguaucc

SEQ ID NO: 8137 - RNA, 12 nt, Artificial Sequence
  Synthetic
guugcagguauc

SEQ ID NO: 8138 - RNA, 12 nt, Artificial Sequence
  Synthetic
uguugcagguau

SEQ ID NO: 8139 - RNA, 12 nt, Artificial Sequence
  Synthetic
auguugcaggua

SEQ ID NO: 8140 - RNA, 12 nt, Artificial Sequence
  Synthetic
gauguugcaggu

SEQ ID NO: 8141 - RNA, 12 nt, Artificial Sequence
  Synthetic
cgauguugcagg

SEQ ID NO: 8142 - RNA, 12 nt, Artificial Sequence
  Synthetic
ccgauguugcag

SEQ ID NO: 8143 - RNA, 12 nt, Artificial Sequence
  Synthetic
uccgauguugca

SEQ ID NO: 8144 - RNA, 12 nt, Artificial Sequence
  Synthetic
cuccgauguugc

SEQ ID NO: 8145 - RNA, 12 nt, Artificial Sequence
  Synthetic
acuccgauguug

SEQ ID NO: 8146 - RNA, 12 nt, Artificial Sequence
  Synthetic
cacuccgauguu

SEQ ID NO: 8147 - RNA, 12 nt, Artificial Sequence
  Synthetic
gcacuccgaugu

SEQ ID NO: 8148 - RNA, 12 nt, Artificial Sequence
  Synthetic
ggcacuccgaug

SEQ ID NO: 8149 - RNA, 12 nt, Artificial Sequence
  Synthetic
cggcacuccgau

SEQ ID NO: 8150 - RNA, 12 nt, Artificial Sequence
  Synthetic
acggcacuccga

SEQ ID NO: 8151 - RNA, 12 nt, Artificial Sequence
  Synthetic
cacggcacuccg

SEQ ID NO: 8152 - RNA, 12 nt, Artificial Sequence
  Synthetic
ccacggcacucc

SEQ ID NO: 8153 - RNA, 12 nt, Artificial Sequence
  Synthetic
accacggcacuc

SEQ ID NO: 8154 - RNA, 12 nt, Artificial Sequence
  Synthetic
uaccacggcacu

SEQ ID NO: 8155 - RNA, 12 nt, Artificial Sequence
  Synthetic
guaccacggcac

SEQ ID NO: 8156 - RNA, 12 nt, Artificial Sequence
  Synthetic
cguaccacggca

SEQ ID NO: 8157 - RNA, 12 nt, Artificial Sequence
  Synthetic
ucguaccacggc

SEQ ID NO: 8158 - RNA, 12 nt, Artificial Sequence
  Synthetic
gucguaccacgg

SEQ ID NO: 8159 - RNA, 12 nt, Artificial Sequence
  Synthetic
ggucguaccacg

SEQ ID NO: 8160 - RNA, 12 nt, Artificial Sequence
  Synthetic
cggucguaccac

SEQ ID NO: 8161 - RNA, 12 nt, Artificial Sequence
  Synthetic
gcggucguacca

SEQ ID NO: 8162 - RNA, 12 nt, Artificial Sequence
  Synthetic
cgcggucguacc

SEQ ID NO: 8163 - RNA, 12 nt, Artificial Sequence
  Synthetic
ucgcggucguac

SEQ ID NO: 8164 - RNA, 12 nt, Artificial Sequence
  Synthetic
cucgcggucgua

SEQ ID NO: 8165 - RNA, 12 nt, Artificial Sequence
  Synthetic
ccucgcggucgu

SEQ ID NO: 8166 - RNA, 12 nt, Artificial Sequence
  Synthetic
gccucgcggucg

SEQ ID NO: 8167 - RNA, 12 nt, Artificial Sequence
  Synthetic
ggccucgcgguc

SEQ ID NO: 8168 - RNA, 12 nt, Artificial Sequence
  Synthetic
uggccucgcggu

SEQ ID NO: 8169 - RNA, 12 nt, Artificial Sequence
  Synthetic
uuggccucgcgg

SEQ ID NO: 8170 - RNA, 12 nt, Artificial Sequence
  Synthetic
guuggccucgcg

SEQ ID NO: 8171 - RNA, 12 nt, Artificial Sequence
  Synthetic
cguuggccucgc

SEQ ID NO: 8172 - RNA, 12 nt, Artificial Sequence
  Synthetic
ucguuggccucg

SEQ ID NO: 8173 - RNA, 12 nt, Artificial Sequence
  Synthetic
gucguuggccuc

SEQ ID NO: 8174 - RNA, 12 nt, Artificial Sequence
  Synthetic
cgucguuggccu

SEQ ID NO: 8175 - RNA, 12 nt, Artificial Sequence
  Synthetic
gcgucguuggcc

SEQ ID NO: 8176 - RNA, 12 nt, Artificial Sequence
  Synthetic
agcgucguuggc

SEQ ID NO: 8177 - RNA, 12 nt, Artificial Sequence
  Synthetic
cagcgucguugg

SEQ ID NO: 8178 - RNA, 12 nt, Artificial Sequence
  Synthetic
acagcgucguug

SEQ ID NO: 8179 - RNA, 12 nt, Artificial Sequence
  Synthetic
gacagcgucguu

SEQ ID NO: 8180 - RNA, 12 nt, Artificial Sequence
  Synthetic
ggacagcgucgu

SEQ ID NO: 8181 - RNA, 12 nt, Artificial Sequence
  Synthetic
aggacagcgucg

SEQ ID NO: 8182 - RNA, 12 nt, Artificial Sequence
  Synthetic
gaggacagcguc

SEQ ID NO: 8183 - RNA, 12 nt, Artificial Sequence
  Synthetic
agaggacagcgu

SEQ ID NO: 8184 - RNA, 12 nt, Artificial Sequence
  Synthetic
aagaggacagcg

SEQ ID NO: 8185 - RNA, 12 nt, Artificial Sequence
  Synthetic
aaagaggacagc

SEQ ID NO: 8186 - RNA, 12 nt, Artificial Sequence
  Synthetic
caaagaggacag

SEQ ID NO: 8187 - RNA, 12 nt, Artificial Sequence
  Synthetic
ccaaagaggaca

SEQ ID NO: 8188 - RNA, 12 nt, Artificial Sequence
  Synthetic
gccaaagaggac

SEQ ID NO: 8189 - RNA, 12 nt, Artificial Sequence
  Synthetic
agccaaagagga

SEQ ID NO: 8190 - RNA, 12 nt, Artificial Sequence
  Synthetic
aagccaaagagg

SEQ ID NO: 8191 - RNA, 12 nt, Artificial Sequence
  Synthetic
aaagccaaagag

SEQ ID NO: 8192 - RNA, 12 nt, Artificial Sequence
  Synthetic
gaaagccaaaga

SEQ ID NO: 8193 - RNA, 12 nt, Artificial Sequence
  Synthetic
agaaagccaaag

SEQ ID NO: 8194 - RNA, 12 nt, Artificial Sequence
  Synthetic
cagaaagccaaa

SEQ ID NO: 8195 - RNA, 12 nt, Artificial Sequence
  Synthetic
ucagaaagccaa

SEQ ID NO: 8196 - RNA, 12 nt, Artificial Sequence
  Synthetic
gucagaaagcca

SEQ ID NO: 8197 - RNA, 12 nt, Artificial Sequence
  Synthetic
ggucagaaagcc

SEQ ID NO: 8198 - RNA, 12 nt, Artificial Sequence
  Synthetic
uggucagaaagc

SEQ ID NO: 8199 - RNA, 12 nt, Artificial Sequence
  Synthetic
guggucagaaag

SEQ ID NO: 8200 - RNA, 12 nt, Artificial Sequence
  Synthetic
gguggucagaaa

SEQ ID NO: 8201 - RNA, 12 nt, Artificial Sequence
  Synthetic
agguggucagaa

SEQ ID NO: 8202 - RNA, 12 nt, Artificial Sequence
  Synthetic
cagguggucaga

SEQ ID NO: 8203 - RNA, 12 nt, Artificial Sequence
  Synthetic
ccagguggucag

SEQ ID NO: 8204 - RNA, 12 nt, Artificial Sequence
  Synthetic
accaggugguca

SEQ ID NO: 8205 - RNA, 12 nt, Artificial Sequence
  Synthetic
aaccaggugguc

SEQ ID NO: 8206 - RNA, 12 nt, Artificial Sequence
  Synthetic
gaaccagguggu

SEQ ID NO: 8207 - RNA, 12 nt, Artificial Sequence
  Synthetic
ggaaccaggugg

SEQ ID NO: 8208 - RNA, 12 nt, Artificial Sequence
  Synthetic
aggaaccaggug

SEQ ID NO: 8209 - RNA, 12 nt, Artificial Sequence
  Synthetic
caggaaccaggu

SEQ ID NO: 8210 - RNA, 12 nt, Artificial Sequence
  Synthetic
ccaggaaccagg

SEQ ID NO: 8211 - RNA, 12 nt, Artificial Sequence
  Synthetic
cccaggaaccag

SEQ ID NO: 8212 - RNA, 12 nt, Artificial Sequence
  Synthetic
acccaggaacca

SEQ ID NO: 8213 - RNA, 12 nt, Artificial Sequence
  Synthetic
cacccaggaacc

SEQ ID NO: 8214 - RNA, 12 nt, Artificial Sequence
  Synthetic
ucacccaggaac

SEQ ID NO: 8215 - RNA, 12 nt, Artificial Sequence
  Synthetic
cucacccaggaa

SEQ ID NO: 8216 - RNA, 12 nt, Artificial Sequence
  Synthetic
acucacccagga

SEQ ID NO: 8217 - RNA, 12 nt, Artificial Sequence
  Synthetic
aacucacccagg

SEQ ID NO: 8218 - RNA, 12 nt, Artificial Sequence
  Synthetic
gaacucacccag

SEQ ID NO: 8219 - RNA, 12 nt, Artificial Sequence
  Synthetic
ggaacucaccca

SEQ ID NO: 8220 - RNA, 12 nt, Artificial Sequence
  Synthetic
aggaacucaccc

SEQ ID NO: 8221 - RNA, 12 nt, Artificial Sequence
  Synthetic
caggaacucacc

SEQ ID NO: 8222 - RNA, 12 nt, Artificial Sequence
  Synthetic
ccaggaacucac

SEQ ID NO: 8223 - RNA, 12 nt, Artificial Sequence
  Synthetic
gccaggaacuca

SEQ ID NO: 8224 - RNA, 12 nt, Artificial Sequence
  Synthetic
ugccaggaacuc

SEQ ID NO: 8225 - RNA, 12 nt, Artificial Sequence
  Synthetic
gugccaggaacu

SEQ ID NO: 8226 - RNA, 12 nt, Artificial Sequence
  Synthetic
ugugccaggaac

SEQ ID NO: 8227 - RNA, 12 nt, Artificial Sequence
  Synthetic
cugugccaggaa

SEQ ID NO: 8228 - RNA, 12 nt, Artificial Sequence
  Synthetic
ucugugccagga

SEQ ID NO: 8229 - RNA, 12 nt, Artificial Sequence
  Synthetic
cucugugccagg

SEQ ID NO: 8230 - RNA, 12 nt, Artificial Sequence
  Synthetic
acucugugccag

SEQ ID NO: 8231 - RNA, 12 nt, Artificial Sequence
  Synthetic
cacucugugcca

SEQ ID NO: 8232 - RNA, 12 nt, Artificial Sequence
  Synthetic
ucacucugugcc

SEQ ID NO: 8233 - RNA, 12 nt, Artificial Sequence
  Synthetic
cucacucugugc

SEQ ID NO: 8234 - RNA, 12 nt, Artificial Sequence
  Synthetic
ccucacucugug

SEQ ID NO: 8235 - RNA, 12 nt, Artificial Sequence
  Synthetic
uccucacucugu

SEQ ID NO: 8236 - RNA, 12 nt, Artificial Sequence
  Synthetic
cuccucacucug

SEQ ID NO: 8237 - RNA, 12 nt, Artificial Sequence
  Synthetic
ucuccucacucu

SEQ ID NO: 8238 - RNA, 12 nt, Artificial Sequence
  Synthetic
uucuccucacuc

SEQ ID NO: 8239 - RNA, 12 nt, Artificial Sequence
  Synthetic
cuucuccucacu

SEQ ID NO: 8240 - RNA, 12 nt, Artificial Sequence
  Synthetic
gcuucuccucac

SEQ ID NO: 8241 - RNA, 12 nt, Artificial Sequence
  Synthetic
ggcuucuccuca

SEQ ID NO: 8242 - RNA, 12 nt, Artificial Sequence
  Synthetic
uggcuucuccuc

SEQ ID NO: 8243 - RNA, 12 nt, Artificial Sequence
  Synthetic
guggcuucuccu

SEQ ID NO: 8244 - RNA, 12 nt, Artificial Sequence
  Synthetic
uguggcuucucc

SEQ ID NO: 8245 - RNA, 12 nt, Artificial Sequence
  Synthetic
auguggcuucuc

SEQ ID NO: 8246 - RNA, 12 nt, Artificial Sequence
  Synthetic
cauguggcuucu

SEQ ID NO: 8247 - RNA, 12 nt, Artificial Sequence
  Synthetic
acauguggcuuc

SEQ ID NO: 8248 - RNA, 12 nt, Artificial Sequence
  Synthetic
cacauguggcuu

SEQ ID NO: 8249 - RNA, 12 nt, Artificial Sequence
  Synthetic
ccacauguggcu

SEQ ID NO: 8250 - RNA, 12 nt, Artificial Sequence
  Synthetic
accacauguggc

SEQ ID NO: 8251 - RNA, 12 nt, Artificial Sequence
  Synthetic
aaccacaugugg

SEQ ID NO: 8252 - RNA, 12 nt, Artificial Sequence
  Synthetic
caaccacaugug

SEQ ID NO: 8253 - RNA, 12 nt, Artificial Sequence
  Synthetic
gcaaccacaugu

SEQ ID NO: 8254 - RNA, 12 nt, Artificial Sequence
  Synthetic
agcaaccacaug

SEQ ID NO: 8255 - RNA, 12 nt, Artificial Sequence
  Synthetic
gagcaaccacau

SEQ ID NO: 8256 - RNA, 12 nt, Artificial Sequence
  Synthetic
ugagcaaccaca

SEQ ID NO: 8257 - RNA, 12 nt, Artificial Sequence
  Synthetic
gugagcaaccac

SEQ ID NO: 8258 - RNA, 12 nt, Artificial Sequence
  Synthetic
agugagcaacca

SEQ ID NO: 8259 - RNA, 12 nt, Artificial Sequence
  Synthetic
aagugagcaacc

SEQ ID NO: 8260 - RNA, 12 nt, Artificial Sequence
  Synthetic
gaagugagcaac

SEQ ID NO: 8261 - RNA, 12 nt, Artificial Sequence
  Synthetic
ggaagugagcaa

SEQ ID NO: 8262 - RNA, 12 nt, Artificial Sequence
  Synthetic
uggaagugagca

SEQ ID NO: 8263 - RNA, 12 nt, Artificial Sequence
  Synthetic
auggaagugagc

SEQ ID NO: 8264 - RNA, 12 nt, Artificial Sequence
  Synthetic
cauggaagugag

SEQ ID NO: 8265 - RNA, 12 nt, Artificial Sequence
  Synthetic
ucauggaaguga

SEQ ID NO: 8266 - RNA, 12 nt, Artificial Sequence
  Synthetic
cucauggaagug

SEQ ID NO: 8267 - RNA, 12 nt, Artificial Sequence
  Synthetic
acucauggaagu

SEQ ID NO: 8268 - RNA, 12 nt, Artificial Sequence
  Synthetic
cacucauggaag

SEQ ID NO: 8269 - RNA, 12 nt, Artificial Sequence
  Synthetic
ccacucauggaa

SEQ ID NO: 8270 - RNA, 12 nt, Artificial Sequence
  Synthetic
accacucaugga

SEQ ID NO: 8271 - RNA, 12 nt, Artificial Sequence
  Synthetic
aaccacucaugg

SEQ ID NO: 8272 - RNA, 12 nt, Artificial Sequence
  Synthetic
caaccacucaug

SEQ ID NO: 8273 - RNA, 12 nt, Artificial Sequence
  Synthetic
ccaaccacucau

SEQ ID NO: 8274 - RNA, 12 nt, Artificial Sequence
  Synthetic
gccaaccacuca

SEQ ID NO: 8275 - RNA, 12 nt, Artificial Sequence
  Synthetic
ugccaaccacuc

SEQ ID NO: 8276 - RNA, 12 nt, Artificial Sequence
  Synthetic
cugccaaccacu

SEQ ID NO: 8277 - RNA, 12 nt, Artificial Sequence
  Synthetic
ccugccaaccac

SEQ ID NO: 8278 - RNA, 12 nt, Artificial Sequence
  Synthetic
gccugccaacca

SEQ ID NO: 8279 - RNA, 12 nt, Artificial Sequence
  Synthetic
cgccugccaacc

SEQ ID NO: 8280 - RNA, 12 nt, Artificial Sequence
  Synthetic
acgccugccaac

SEQ ID NO: 8281 - RNA, 12 nt, Artificial Sequence
  Synthetic
aacgccugccaa

SEQ ID NO: 8282 - RNA, 12 nt, Artificial Sequence
  Synthetic
caacgccugcca

SEQ ID NO: 8283 - RNA, 12 nt, Artificial Sequence
  Synthetic
ccaacgccugcc

SEQ ID NO: 8284 - RNA, 12 nt, Artificial Sequence
  Synthetic
uccaacgccugc

SEQ ID NO: 8285 - RNA, 12 nt, Artificial Sequence
  Synthetic
guccaacgccug

SEQ ID NO: 8286 - RNA, 12 nt, Artificial Sequence
  Synthetic
aguccaacgccu

SEQ ID NO: 8287 - RNA, 12 nt, Artificial Sequence
  Synthetic
gaguccaacgcc

SEQ ID NO: 8288 - RNA, 12 nt, Artificial Sequence
  Synthetic
agaguccaacgc

SEQ ID NO: 8289 - RNA, 12 nt, Artificial Sequence
  Synthetic
cagaguccaacg

SEQ ID NO: 8290 - RNA, 12 nt, Artificial Sequence
  Synthetic
gcagaguccaac

SEQ ID NO: 8291 - RNA, 12 nt, Artificial Sequence
  Synthetic
ggcagaguccaa

SEQ ID NO: 8292 - RNA, 12 nt, Artificial Sequence
  Synthetic
aggcagagucca

SEQ ID NO: 8293 - RNA, 12 nt, Artificial Sequence
  Synthetic
caggcagagucc

SEQ ID NO: 8294 - RNA, 12 nt, Artificial Sequence
  Synthetic
acaggcagaguc

SEQ ID NO: 8295 - RNA, 12 nt, Artificial Sequence
  Synthetic
cacaggcagagu

SEQ ID NO: 8296 - RNA, 12 nt, Artificial Sequence
  Synthetic
acacaggcagag

SEQ ID NO: 8297 - RNA, 12 nt, Artificial Sequence
  Synthetic
gacacaggcaga

SEQ ID NO: 8298 - RNA, 12 nt, Artificial Sequence
  Synthetic
cgacacaggcag

SEQ ID NO: 8299 - RNA, 12 nt, Artificial Sequence
  Synthetic
acgacacaggca

SEQ ID NO: 8300 - RNA, 12 nt, Artificial Sequence
  Synthetic
cacgacacaggc

SEQ ID NO: 8301 - RNA, 12 nt, Artificial Sequence
  Synthetic
gcacgacacagg

SEQ ID NO: 8302 - RNA, 12 nt, Artificial Sequence
  Synthetic
ggcacgacacag

SEQ ID NO: 8303 - RNA, 12 nt, Artificial Sequence
  Synthetic
gggcacgacaca

SEQ ID NO: 8304 - RNA, 12 nt, Artificial Sequence
  Synthetic
cgggcacgacac

SEQ ID NO: 8305 - RNA, 12 nt, Artificial Sequence
  Synthetic
ccgggcacgaca

SEQ ID NO: 8306 - RNA, 12 nt, Artificial Sequence
  Synthetic
gccgggcacgac

SEQ ID NO: 8307 - RNA, 12 nt, Artificial Sequence
  Synthetic
cgccgggcacga

SEQ ID NO: 8308 - RNA, 12 nt, Artificial Sequence
  Synthetic
ucgccgggcacg

SEQ ID NO: 8309 - RNA, 12 nt, Artificial Sequence
  Synthetic
gucgccgggcac

SEQ ID NO: 8310 - RNA, 12 nt, Artificial Sequence
  Synthetic
agucgccgggca

SEQ ID NO: 8311 - RNA, 12 nt, Artificial Sequence
  Synthetic
cagucgccgggc

SEQ ID NO: 8312 - RNA, 12 nt, Artificial Sequence
  Synthetic
gcagucgccggg

SEQ ID NO: 8313 - RNA, 12 nt, Artificial Sequence
  Synthetic
ggcagucgccgg

SEQ ID NO: 8314 - RNA, 12 nt, Artificial Sequence
  Synthetic
aggcagucgccg

SEQ ID NO: 8315 - RNA, 12 nt, Artificial Sequence
  Synthetic
caggcagucgcc

SEQ ID NO: 8316 - RNA, 12 nt, Artificial Sequence
  Synthetic
acaggcagucgc

SEQ ID NO: 8317 - RNA, 12 nt, Artificial Sequence
  Synthetic
uacaggcagucg

SEQ ID NO: 8318 - RNA, 12 nt, Artificial Sequence
  Synthetic
cuacaggcaguc

SEQ ID NO: 8319 - RNA, 12 nt, Artificial Sequence
  Synthetic
gcuacaggcagu

SEQ ID NO: 8320 - RNA, 12 nt, Artificial Sequence
  Synthetic
ugcuacaggcag

SEQ ID NO: 8321 - RNA, 12 nt, Artificial Sequence
  Synthetic
uugcuacaggca

SEQ ID NO: 8322 - RNA, 12 nt, Artificial Sequence
  Synthetic
guugcuacaggc

SEQ ID NO: 8323 - RNA, 12 nt, Artificial Sequence
  Synthetic
gguugcuacagg

SEQ ID NO: 8324 - RNA, 12 nt, Artificial Sequence
  Synthetic
ugguugcuacag

SEQ ID NO: 8325 - RNA, 12 nt, Artificial Sequence
  Synthetic
augguugcuaca

SEQ ID NO: 8326 - RNA, 12 nt, Artificial Sequence
  Synthetic
gaugguugcuac

SEQ ID NO: 8327 - RNA, 12 nt, Artificial Sequence
  Synthetic
agaugguugcua

SEQ ID NO: 8328 - RNA, 12 nt, Artificial Sequence
  Synthetic
aagaugguugcu

SEQ ID NO: 8329 - RNA, 12 nt, Artificial Sequence
  Synthetic
gaagaugguugc

SEQ ID NO: 8330 - RNA, 12 nt, Artificial Sequence
  Synthetic
ugaagaugguug

SEQ ID NO: 8331 - RNA, 12 nt, Artificial Sequence
  Synthetic
gugaagaugguu

SEQ ID NO: 8332 - RNA, 12 nt, Artificial Sequence
  Synthetic
ggugaagauggu

SEQ ID NO: 8333 - RNA, 12 nt, Artificial Sequence
  Synthetic
uggugaagaugg

SEQ ID NO: 8334 - RNA, 12 nt, Artificial Sequence
  Synthetic
guggugaagaug

SEQ ID NO: 8335 - RNA, 12 nt, Artificial Sequence
  Synthetic
gguggugaagau

SEQ ID NO: 8336 - RNA, 12 nt, Artificial Sequence
  Synthetic
ggguggugaaga

SEQ ID NO: 8337 - RNA, 12 nt, Artificial Sequence
  Synthetic
uggguggugaag

SEQ ID NO: 8338 - RNA, 12 nt, Artificial Sequence
  Synthetic
auggguggugaa

SEQ ID NO: 8339 - RNA, 12 nt, Artificial Sequence
  Synthetic
caugggugguga

SEQ ID NO: 8340 - RNA, 12 nt, Artificial Sequence
  Synthetic
gcauggguggug

SEQ ID NO: 8341 - RNA, 12 nt, Artificial Sequence
  Synthetic
ggcauggguggu

SEQ ID NO: 8342 - RNA, 12 nt, Artificial Sequence
  Synthetic
uggcaugggugg

SEQ ID NO: 8343 - RNA, 12 nt, Artificial Sequence
  Synthetic
guggcaugggug

SEQ ID NO: 8344 - RNA, 12 nt, Artificial Sequence
  Synthetic
cguggcaugggu

SEQ ID NO: 8345 - RNA, 12 nt, Artificial Sequence
  Synthetic
gcguggcauggg

SEQ ID NO: 8346 - RNA, 12 nt, Artificial Sequence
  Synthetic
agcguggcaugg

SEQ ID NO: 8347 - RNA, 12 nt, Artificial Sequence
  Synthetic
cagcguggcaug

SEQ ID NO: 8348 - RNA, 12 nt, Artificial Sequence
  Synthetic
gcagcguggcau

SEQ ID NO: 8349 - RNA, 12 nt, Artificial Sequence
  Synthetic
agcagcguggca

SEQ ID NO: 8350 - RNA, 12 nt, Artificial Sequence
  Synthetic
cagcagcguggc

SEQ ID NO: 8351 - RNA, 12 nt, Artificial Sequence
  Synthetic
ccagcagcgugg

SEQ ID NO: 8352 - RNA, 12 nt, Artificial Sequence
  Synthetic
cccagcagcgug

SEQ ID NO: 8353 - RNA, 12 nt, Artificial Sequence
  Synthetic
ccccagcagcgu

SEQ ID NO: 8354 - RNA, 12 nt, Artificial Sequence
  Synthetic
gccccagcagcg

SEQ ID NO: 8355 - RNA, 12 nt, Artificial Sequence
  Synthetic
cgccccagcagc

SEQ ID NO: 8356 - RNA, 12 nt, Artificial Sequence
  Synthetic
gcgccccagcag

SEQ ID NO: 8357 - RNA, 12 nt, Artificial Sequence
  Synthetic
agcgccccagca

SEQ ID NO: 8358 - RNA, 12 nt, Artificial Sequence
  Synthetic
uagcgccccagc

SEQ ID NO: 8359 - RNA, 12 nt, Artificial Sequence
  Synthetic
guagcgccccag

SEQ ID NO: 8360 - RNA, 12 nt, Artificial Sequence
  Synthetic
gguagcgcccca

SEQ ID NO: 8361 - RNA, 12 nt, Artificial Sequence
  Synthetic
agguagcgcccc

SEQ ID NO: 8362 - RNA, 12 nt, Artificial Sequence
  Synthetic
cagguagcgccc

SEQ ID NO: 8363 - RNA, 12 nt, Artificial Sequence
  Synthetic
acagguagcgcc

SEQ ID NO: 8364 - RNA, 12 nt, Artificial Sequence
  Synthetic
cacagguagcgc

SEQ ID NO: 8365 - RNA, 12 nt, Artificial Sequence
  Synthetic
acacagguagcg

SEQ ID NO: 8366 - RNA, 12 nt, Artificial Sequence
  Synthetic
cacacagguagc

SEQ ID NO: 8367 - RNA, 12 nt, Artificial Sequence
  Synthetic
gcacacagguag

SEQ ID NO: 8368 - RNA, 12 nt, Artificial Sequence
  Synthetic
ggcacacaggua

SEQ ID NO: 8369 - RNA, 12 nt, Artificial Sequence
  Synthetic
cggcacacaggu

SEQ ID NO: 8370 - RNA, 12 nt, Artificial Sequence
  Synthetic
ccggcacacagg

SEQ ID NO: 8371 - RNA, 12 nt, Artificial Sequence
  Synthetic
accggcacacag

SEQ ID NO: 8372 - RNA, 12 nt, Artificial Sequence
  Synthetic
caccggcacaca

SEQ ID NO: 8373 - RNA, 12 nt, Artificial Sequence
  Synthetic
gcaccggcacac

SEQ ID NO: 8374 - RNA, 12 nt, Artificial Sequence
  Synthetic
ggcaccggcaca

SEQ ID NO: 8375 - RNA, 12 nt, Artificial Sequence
  Synthetic
cggcaccggcac

SEQ ID NO: 8376 - RNA, 12 nt, Artificial Sequence
  Synthetic
acggcaccggca

SEQ ID NO: 8377 - RNA, 12 nt, Artificial Sequence
  Synthetic
cacggcaccggc

SEQ ID NO: 8378 - RNA, 12 nt, Artificial Sequence
  Synthetic
ccacggcaccgg

SEQ ID NO: 8379 - RNA, 12 nt, Artificial Sequence
  Synthetic
uccacggcaccg

SEQ ID NO: 8380 - RNA, 12 nt, Artificial Sequence
  Synthetic
guccacggcacc

SEQ ID NO: 8381 - RNA, 12 nt, Artificial Sequence
  Synthetic
aguccacggcac

SEQ ID NO: 8382 - RNA, 12 nt, Artificial Sequence
  Synthetic
aaguccacggca

SEQ ID NO: 8383 - RNA, 12 nt, Artificial Sequence
  Synthetic
gaaguccacggc

SEQ ID NO: 8384 - RNA, 12 nt, Artificial Sequence
  Synthetic
agaaguccacgg

SEQ ID NO: 8385 - RNA, 12 nt, Artificial Sequence
  Synthetic
uagaaguccacg

SEQ ID NO: 8386 - RNA, 12 nt, Artificial Sequence
  Synthetic
guagaaguccac

SEQ ID NO: 8387 - RNA, 12 nt, Artificial Sequence
  Synthetic
uguagaagucca

SEQ ID NO: 8388 - RNA, 12 nt, Artificial Sequence
  Synthetic
uuguagaagucc

SEQ ID NO: 8389 - RNA, 12 nt, Artificial Sequence
  Synthetic
guuguagaaguc

SEQ ID NO: 8390 - RNA, 12 nt, Artificial Sequence
  Synthetic
uguuguagaagu

SEQ ID NO: 8391 - RNA, 12 nt, Artificial Sequence
  Synthetic
uuguuguagaag

SEQ ID NO: 8392 - RNA, 12 nt, Artificial Sequence
  Synthetic
guuguuguagaa

SEQ ID NO: 8393 - RNA, 12 nt, Artificial Sequence
  Synthetic
gguuguuguaga

SEQ ID NO: 8394 - RNA, 12 nt, Artificial Sequence
  Synthetic
agguuguuguag

SEQ ID NO: 8395 - RNA, 12 nt, Artificial Sequence
  Synthetic
cagguuguugua

SEQ ID NO: 8396 - RNA, 12 nt, Artificial Sequence
  Synthetic
ccagguuguugu

SEQ ID NO: 8397 - RNA, 12 nt, Artificial Sequence
  Synthetic
uccagguuguug

SEQ ID NO: 8398 - RNA, 12 nt, Artificial Sequence
  Synthetic
cuccagguuguu

SEQ ID NO: 8399 - RNA, 12 nt, Artificial Sequence
  Synthetic
ucuccagguugu

SEQ ID NO: 8400 - RNA, 12 nt, Artificial Sequence
  Synthetic
uucuccagguug

SEQ ID NO: 8401 - RNA, 12 nt, Artificial Sequence
  Synthetic
guucuccagguu

SEQ ID NO: 8402 - RNA, 12 nt, Artificial Sequence
  Synthetic
aguucuccaggu

SEQ ID NO: 8403 - RNA, 12 nt, Artificial Sequence
  Synthetic
aaguucuccagg

SEQ ID NO: 8404 - RNA, 12 nt, Artificial Sequence
  Synthetic
gaaguucuccag

SEQ ID NO: 8405 - RNA, 12 nt, Artificial Sequence
  Synthetic
ugaaguucucca

SEQ ID NO: 8406 - RNA, 12 nt, Artificial Sequence
  Synthetic
uugaaguucucc

SEQ ID NO: 8407 - RNA, 12 nt, Artificial Sequence
  Synthetic
guugaaguucuc

SEQ ID NO: 8408 - RNA, 12 nt, Artificial Sequence
  Synthetic
cguugaaguucu

SEQ ID NO: 8409 - RNA, 12 nt, Artificial Sequence
  Synthetic
acguugaaguuc

SEQ ID NO: 8410 - RNA, 12 nt, Artificial Sequence
  Synthetic
cacguugaaguu

SEQ ID NO: 8411 - RNA, 12 nt, Artificial Sequence
  Synthetic
ccacguugaagu

SEQ ID NO: 8412 - RNA, 12 nt, Artificial Sequence
  Synthetic
uccacguugaag

SEQ ID NO: 8413 - RNA, 12 nt, Artificial Sequence
  Synthetic
guccacguugaa

SEQ ID NO: 8414 - RNA, 12 nt, Artificial Sequence
  Synthetic
uguccacguuga

SEQ ID NO: 8415 - RNA, 12 nt, Artificial Sequence
  Synthetic
uuguccacguug

SEQ ID NO: 8416 - RNA, 12 nt, Artificial Sequence
  Synthetic
cuuguccacguu

SEQ ID NO: 8417 - RNA, 12 nt, Artificial Sequence
  Synthetic
ccuuguccacgu

SEQ ID NO: 8418 - RNA, 12 nt, Artificial Sequence
  Synthetic
uccuuguccacg

SEQ ID NO: 8419 - RNA, 12 nt, Artificial Sequence
  Synthetic
uuccuuguccac

SEQ ID NO: 8420 - RNA, 12 nt, Artificial Sequence
  Synthetic
cuuccuugucca

SEQ ID NO: 8421 - RNA, 12 nt, Artificial Sequence
  Synthetic
gcuuccuugucc

SEQ ID NO: 8422 - RNA, 12 nt, Artificial Sequence
  Synthetic
ugcuuccuuguc

SEQ ID NO: 8423 - RNA, 12 nt, Artificial Sequence
  Synthetic
cugcuuccuugu

SEQ ID NO: 8424 - RNA, 12 nt, Artificial Sequence
  Synthetic
ccugcuuccuug

SEQ ID NO: 8425 - RNA, 12 nt, Artificial Sequence
  Synthetic
cccugcuuccuu

SEQ ID NO: 8426 - RNA, 12 nt, Artificial Sequence
  Synthetic
ccccugcuuccu

SEQ ID NO: 8427 - RNA, 12 nt, Artificial Sequence
  Synthetic
uccccugcuucc

SEQ ID NO: 8428 - RNA, 12 nt, Artificial Sequence
  Synthetic
cuccccugcuuc

SEQ ID NO: 8429 - RNA, 12 nt, Artificial Sequence
  Synthetic
ucuccccugcuu

SEQ ID NO: 8430 - RNA, 12 nt, Artificial Sequence
  Synthetic
cucuccccugcu

SEQ ID NO: 8431 - RNA, 12 nt, Artificial Sequence
  Synthetic
ccucuccccugc

SEQ ID NO: 8432 - RNA, 12 nt, Artificial Sequence
  Synthetic
gccucuccccug

SEQ ID NO: 8433 - RNA, 12 nt, Artificial Sequence
  Synthetic
ugccucuccccu

SEQ ID NO: 8434 - RNA, 12 nt, Artificial Sequence
  Synthetic
cugccucucccc

SEQ ID NO: 8435 - RNA, 12 nt, Artificial Sequence
  Synthetic
ucugccucuccc

SEQ ID NO: 8436 - RNA, 12 nt, Artificial Sequence
  Synthetic
aucugccucucc

SEQ ID NO: 8437 - RNA, 12 nt, Artificial Sequence
  Synthetic
gaucugccucuc

SEQ ID NO: 8438 - RNA, 12 nt, Artificial Sequence
  Synthetic
agaucugccucu

SEQ ID NO: 8439 - RNA, 12 nt, Artificial Sequence
  Synthetic
uagaucugccuc

SEQ ID NO: 8440 - RNA, 12 nt, Artificial Sequence
  Synthetic
guagaucugccu

SEQ ID NO: 8441 - RNA, 12 nt, Artificial Sequence
  Synthetic
gguagaucugcc

SEQ ID NO: 8442 - RNA, 12 nt, Artificial Sequence
  Synthetic
ugguagaucugc

SEQ ID NO: 8443 - RNA, 12 nt, Artificial Sequence
  Synthetic
gugguagaucug

SEQ ID NO: 8444 - RNA, 12 nt, Artificial Sequence
  Synthetic
ggugguagaucu

SEQ ID NO: 8445 - RNA, 12 nt, Artificial Sequence
  Synthetic
cggugguagauc

SEQ ID NO: 8446 - RNA, 12 nt, Artificial Sequence
  Synthetic
ucggugguagau

SEQ ID NO: 8447 - RNA, 12 nt, Artificial Sequence
  Synthetic
aucggugguaga

SEQ ID NO: 8448 - RNA, 12 nt, Artificial Sequence
  Synthetic
uaucggugguag

SEQ ID NO: 8449 - RNA, 12 nt, Artificial Sequence
  Synthetic
guaucgguggua

SEQ ID NO: 8450 - RNA, 12 nt, Artificial Sequence
  Synthetic
aguaucgguggu

SEQ ID NO: 8451 - RNA, 12 nt, Artificial Sequence
  Synthetic
caguaucggugg

SEQ ID NO: 8452 - RNA, 12 nt, Artificial Sequence
  Synthetic
gcaguaucggug

SEQ ID NO: 8453 - RNA, 12 nt, Artificial Sequence
  Synthetic
ugcaguaucggu

SEQ ID NO: 8454 - RNA, 12 nt, Artificial Sequence
  Synthetic
augcaguaucgg

SEQ ID NO: 8455 - RNA, 12 nt, Artificial Sequence
  Synthetic
caugcaguaucg

SEQ ID NO: 8456 - RNA, 12 nt, Artificial Sequence
  Synthetic
ccaugcaguauc

SEQ ID NO: 8457 - RNA, 12 nt, Artificial Sequence
  Synthetic
uccaugcaguau

SEQ ID NO: 8458 - RNA, 12 nt, Artificial Sequence
  Synthetic
uuccaugcagua

SEQ ID NO: 8459 - RNA, 12 nt, Artificial Sequence
  Synthetic
uuuccaugcagu

SEQ ID NO: 8460 - RNA, 12 nt, Artificial Sequence
  Synthetic
cuuuccaugcag

SEQ ID NO: 8461 - RNA, 12 nt, Artificial Sequence
  Synthetic
ccuuuccaugca

SEQ ID NO: 8462 - RNA, 12 nt, Artificial Sequence
  Synthetic
cccuuuccaugc

SEQ ID NO: 8463 - RNA, 12 nt, Artificial Sequence
  Synthetic
gcccuuuccaug

SEQ ID NO: 8464 - RNA, 12 nt, Artificial Sequence
  Synthetic
cgcccuuuccau

SEQ ID NO: 8465 - RNA, 12 nt, Artificial Sequence
  Synthetic
ccgcccuuucca

SEQ ID NO: 8466 - RNA, 12 nt, Artificial Sequence
  Synthetic
gccgcccuuucc

SEQ ID NO: 8467 - RNA, 12 nt, Artificial Sequence
  Synthetic
ugccgcccuuuc

SEQ ID NO: 8468 - RNA, 12 nt, Artificial Sequence
  Synthetic
cugccgcccuuu

SEQ ID NO: 8469 - RNA, 12 nt, Artificial Sequence
  Synthetic
gcugccgcccuu

SEQ ID NO: 8470 - RNA, 12 nt, Artificial Sequence
  Synthetic
ggcugccgcccu

SEQ ID NO: 8471 - RNA, 12 nt, Artificial Sequence
  Synthetic
gggcugccgccc

SEQ ID NO: 8472 - RNA, 12 nt, Artificial Sequence
  Synthetic
ugggcugccgcc

SEQ ID NO: 8473 - RNA, 12 nt, Artificial Sequence
  Synthetic
gugggcugccgc

SEQ ID NO: 8474 - RNA, 12 nt, Artificial Sequence
  Synthetic
agugggcugccg

SEQ ID NO: 8475 - RNA, 12 nt, Artificial Sequence
  Synthetic
cagugggcugcc

SEQ ID NO: 8476 - RNA, 12 nt, Artificial Sequence
  Synthetic
gcagugggcugc

SEQ ID NO: 8477 - RNA, 12 nt, Artificial Sequence
  Synthetic
cgcagugggcug

SEQ ID NO: 8478 - RNA, 12 nt, Artificial Sequence
  Synthetic
gcgcagugggcu

SEQ ID NO: 8479 - RNA, 12 nt, Artificial Sequence
  Synthetic
agcgcagugggc

SEQ ID NO: 8480 - RNA, 12 nt, Artificial Sequence
  Synthetic
gagcgcaguggg

SEQ ID NO: 8481 - RNA, 12 nt, Artificial Sequence
  Synthetic
ugagcgcagugg

SEQ ID NO: 8482 - RNA, 12 nt, Artificial Sequence
  Synthetic
gugagcgcagug

SEQ ID NO: 8483 - RNA, 12 nt, Artificial Sequence
  Synthetic
cgugagcgcagu

SEQ ID NO: 8484 - RNA, 12 nt, Artificial Sequence
  Synthetic
acgugagcgcag

SEQ ID NO: 8485 - RNA, 12 nt, Artificial Sequence
  Synthetic
gacgugagcgca

SEQ ID NO: 8486 - RNA, 12 nt, Artificial Sequence
  Synthetic
agacgugagcgc

SEQ ID NO: 8487 - RNA, 12 nt, Artificial Sequence
  Synthetic
aagacgugagcg

SEQ ID NO: 8488 - RNA, 12 nt, Artificial Sequence
  Synthetic
gaagacgugagc

SEQ ID NO: 8489 - RNA, 12 nt, Artificial Sequence
  Synthetic
ugaagacgugag

SEQ ID NO: 8490 - RNA, 12 nt, Artificial Sequence
  Synthetic
gugaagacguga

SEQ ID NO: 8491 - RNA, 12 nt, Artificial Sequence
  Synthetic
agugaagacgug

SEQ ID NO: 8492 - RNA, 12 nt, Artificial Sequence
  Synthetic
uagugaagacgu

SEQ ID NO: 8493 - RNA, 12 nt, Artificial Sequence
  Synthetic
guagugaagacg

SEQ ID NO: 8494 - RNA, 12 nt, Artificial Sequence
  Synthetic
aguagugaagac

SEQ ID NO: 8495 - RNA, 12 nt, Artificial Sequence
  Synthetic
caguagugaaga

SEQ ID NO: 8496 - RNA, 12 nt, Artificial Sequence
  Synthetic
acaguagugaag

SEQ ID NO: 8497 - RNA, 12 nt, Artificial Sequence
  Synthetic
cacaguagugaa

SEQ ID NO: 8498 - RNA, 12 nt, Artificial Sequence
  Synthetic
acacaguaguga

SEQ ID NO: 8499 - RNA, 12 nt, Artificial Sequence
  Synthetic
gacacaguagug

SEQ ID NO: 8500 - RNA, 12 nt, Artificial Sequence
  Synthetic
ggacacaguagu

SEQ ID NO: 8501 - RNA, 12 nt, Artificial Sequence
  Synthetic
gggacacaguag

SEQ ID NO: 8502 - RNA, 12 nt, Artificial Sequence
  Synthetic
ugggacacagua

SEQ ID NO: 8503 - RNA, 12 nt, Artificial Sequence
  Synthetic
cugggacacagu

SEQ ID NO: 8504 - RNA, 12 nt, Artificial Sequence
  Synthetic
ucugggacacag

SEQ ID NO: 8505 - RNA, 12 nt, Artificial Sequence
  Synthetic
aucugggacaca

SEQ ID NO: 8506 - RNA, 12 nt, Artificial Sequence
  Synthetic
gaucugggacac

SEQ ID NO: 8507 - RNA, 12 nt, Artificial Sequence
  Synthetic
ugaucugggaca

SEQ ID NO: 8508 - RNA, 12 nt, Artificial Sequence
  Synthetic
gugaucugggac

SEQ ID NO: 8509 - RNA, 12 nt, Artificial Sequence
  Synthetic
ggugaucuggga

SEQ ID NO: 8510 - RNA, 12 nt, Artificial Sequence
  Synthetic
cggugaucuggg

SEQ ID NO: 8511 - RNA, 12 nt, Artificial Sequence
  Synthetic
gcggugaucugg

SEQ ID NO: 8512 - RNA, 12 nt, Artificial Sequence
  Synthetic
ggcggugaucug

SEQ ID NO: 8513 - RNA, 12 nt, Artificial Sequence
  Synthetic
uggcggugaucu

SEQ ID NO: 8514 - RNA, 12 nt, Artificial Sequence
  Synthetic
auggcggugauc

SEQ ID NO: 8515 - RNA, 12 nt, Artificial Sequence
  Synthetic
gauggcggugau

SEQ ID NO: 8516 - RNA, 12 nt, Artificial Sequence
  Synthetic
cgauggcgguga

SEQ ID NO: 8517 - RNA, 12 nt, Artificial Sequence
  Synthetic
ucgauggcggug

SEQ ID NO: 8518 - RNA, 12 nt, Artificial Sequence
  Synthetic
cucgauggcggu

SEQ ID NO: 8519 - RNA, 12 nt, Artificial Sequence
  Synthetic
ccucgauggcgg

SEQ ID NO: 8520 - RNA, 12 nt, Artificial Sequence
  Synthetic
gccucgauggcg

SEQ ID NO: 8521 - RNA, 12 nt, Artificial Sequence
  Synthetic
ugccucgauggc

SEQ ID NO: 8522 - RNA, 12 nt, Artificial Sequence
  Synthetic
gugccucgaugg

SEQ ID NO: 8523 - RNA, 12 nt, Artificial Sequence
  Synthetic
ugugccucgaug

SEQ ID NO: 8524 - RNA, 12 nt, Artificial Sequence
  Synthetic
cugugccucgau

SEQ ID NO: 8525 - RNA, 12 nt, Artificial Sequence
  Synthetic
gcugugccucga

SEQ ID NO: 8526 - RNA, 12 nt, Artificial Sequence
  Synthetic
ugcugugccucg

SEQ ID NO: 8527 - RNA, 12 nt, Artificial Sequence
  Synthetic
gugcugugccuc

SEQ ID NO: 8528 - RNA, 12 nt, Artificial Sequence
  Synthetic
agugcugugccu

SEQ ID NO: 8529 - RNA, 12 nt, Artificial Sequence
  Synthetic
aagugcugugcc

SEQ ID NO: 8530 - RNA, 12 nt, Artificial Sequence
  Synthetic
caagugcugugc

SEQ ID NO: 8531 - RNA, 12 nt, Artificial Sequence
  Synthetic
gcaagugcugug

SEQ ID NO: 8532 - RNA, 12 nt, Artificial Sequence
  Synthetic
agcaagugcugu

SEQ ID NO: 8533 - RNA, 12 nt, Artificial Sequence
  Synthetic
gagcaagugcug

SEQ ID NO: 8534 - RNA, 12 nt, Artificial Sequence
  Synthetic
ugagcaagugcu

SEQ ID NO: 8535 - RNA, 12 nt, Artificial Sequence
  Synthetic
uugagcaagugc

SEQ ID NO: 8536 - RNA, 12 nt, Artificial Sequence
  Synthetic
cuugagcaagug

SEQ ID NO: 8537 - RNA, 12 nt, Artificial Sequence
  Synthetic
ucuugagcaagu

SEQ ID NO: 8538 - RNA, 12 nt, Artificial Sequence
  Synthetic
cucuugagcaag

SEQ ID NO: 8539 - RNA, 12 nt, Artificial Sequence
  Synthetic
ccucuugagcaa

SEQ ID NO: 8540 - RNA, 12 nt, Artificial Sequence
  Synthetic
uccucuugagca

SEQ ID NO: 8541 - RNA, 12 nt, Artificial Sequence
  Synthetic
uuccucuugagc

SEQ ID NO: 8542 - RNA, 12 nt, Artificial Sequence
  Synthetic
uuuccucuugag

SEQ ID NO: 8543 - RNA, 12 nt, Artificial Sequence
  Synthetic
guuuccucuuga

SEQ ID NO: 8544 - RNA, 12 nt, Artificial Sequence
  Synthetic
gguuuccucuug

SEQ ID NO: 8545 - RNA, 12 nt, Artificial Sequence
  Synthetic
ugguuuccucuu

SEQ ID NO: 8546 - RNA, 12 nt, Artificial Sequence
  Synthetic
cugguuuccucu

SEQ ID NO: 8547 - RNA, 12 nt, Artificial Sequence
  Synthetic
ucugguuuccuc

SEQ ID NO: 8548 - RNA, 12 nt, Artificial Sequence
  Synthetic
aucugguuuccu

SEQ ID NO: 8549 - RNA, 12 nt, Artificial Sequence
  Synthetic
uaucugguuucc

SEQ ID NO: 8550 - RNA, 12 nt, Artificial Sequence
  Synthetic
auaucugguuuc

SEQ ID NO: 8551 - RNA, 12 nt, Artificial Sequence
  Synthetic
aauaucugguuu

SEQ ID NO: 8552 - RNA, 12 nt, Artificial Sequence
  Synthetic
caauaucugguu

SEQ ID NO: 8553 - RNA, 12 nt, Artificial Sequence
  Synthetic
acaauaucuggu

SEQ ID NO: 8554 - RNA, 12 nt, Artificial Sequence
  Synthetic
cacaauaucugg

SEQ ID NO: 8555 - RNA, 12 nt, Artificial Sequence
  Synthetic
ucacaauaucug

SEQ ID NO: 8556 - RNA, 12 nt, Artificial Sequence
  Synthetic
gucacaauaucu

SEQ ID NO: 8557 - RNA, 12 nt, Artificial Sequence
  Synthetic
ggucacaauauc

SEQ ID NO: 8558 - RNA, 12 nt, Artificial Sequence
  Synthetic
gggucacaauau

SEQ ID NO: 8559 - RNA, 12 nt, Artificial Sequence
  Synthetic
ggggucacaaua

SEQ ID NO: 8560 - RNA, 12 nt, Artificial Sequence
  Synthetic
gggggucacaau

SEQ ID NO: 8561 - RNA, 12 nt, Artificial Sequence
  Synthetic
ugggggucacaa

SEQ ID NO: 8562 - RNA, 12 nt, Artificial Sequence
  Synthetic
uugggggucaca

SEQ ID NO: 8563 - RNA, 12 nt, Artificial Sequence
  Synthetic
auugggggucac

SEQ ID NO: 8564 - RNA, 12 nt, Artificial Sequence
  Synthetic
cauuggggguca

SEQ ID NO: 8565 - RNA, 12 nt, Artificial Sequence
  Synthetic
ccauuggggguc

SEQ ID NO: 8566 - RNA, 12 nt, Artificial Sequence
  Synthetic
cccauugggggu

SEQ ID NO: 8567 - RNA, 12 nt, Artificial Sequence
  Synthetic
gcccauuggggg

SEQ ID NO: 8568 - RNA, 12 nt, Artificial Sequence
  Synthetic
agcccauugggg

SEQ ID NO: 8569 - RNA, 12 nt, Artificial Sequence
  Synthetic
cagcccauuggg

SEQ ID NO: 8570 - RNA, 12 nt, Artificial Sequence
  Synthetic
ucagcccauugg

SEQ ID NO: 8571 - RNA, 12 nt, Artificial Sequence
  Synthetic
uucagcccauug

SEQ ID NO: 8572 - RNA, 12 nt, Artificial Sequence
  Synthetic
auucagcccauu

SEQ ID NO: 8573 - RNA, 12 nt, Artificial Sequence
  Synthetic
cauucagcccau

SEQ ID NO: 8574 - RNA, 12 nt, Artificial Sequence
  Synthetic
acauucagccca

SEQ ID NO: 8575 - RNA, 12 nt, Artificial Sequence
  Synthetic
cacauucagccc

SEQ ID NO: 8576 - RNA, 12 nt, Artificial Sequence
  Synthetic
ucacauucagcc

SEQ ID NO: 8577 - RNA, 12 nt, Artificial Sequence
  Synthetic
uucacauucagc

SEQ ID NO: 8578 - RNA, 12 nt, Artificial Sequence
  Synthetic
cuucacauucag

SEQ ID NO: 8579 - RNA, 12 nt, Artificial Sequence
  Synthetic
ucuucacauuca

SEQ ID NO: 8580 - RNA, 12 nt, Artificial Sequence
  Synthetic
uucuucacauuc

SEQ ID NO: 8581 - RNA, 12 nt, Artificial Sequence
  Synthetic
cuucuucacauu

SEQ ID NO: 8582 - RNA, 12 nt, Artificial Sequence
  Synthetic
acuucuucacau

SEQ ID NO: 8583 - RNA, 12 nt, Artificial Sequence
  Synthetic
aacuucuucaca

SEQ ID NO: 8584 - RNA, 12 nt, Artificial Sequence
  Synthetic
aaacuucuucac

SEQ ID NO: 8585 - RNA, 12 nt, Artificial Sequence
  Synthetic
aaaacuucuuca

SEQ ID NO: 8586 - RNA, 12 nt, Artificial Sequence
  Synthetic
gaaaacuucuuc

SEQ ID NO: 8587 - RNA, 12 nt, Artificial Sequence
  Synthetic
agaaaacuucuu

SEQ ID NO: 8588 - RNA, 12 nt, Artificial Sequence
  Synthetic
cagaaaacuucu

SEQ ID NO: 8589 - RNA, 12 nt, Artificial Sequence
  Synthetic
gcagaaaacuuc

SEQ ID NO: 8590 - RNA, 12 nt, Artificial Sequence
  Synthetic
ggcagaaaacuu

SEQ ID NO: 8591 - RNA, 12 nt, Artificial Sequence
  Synthetic
uggcagaaaacu

SEQ ID NO: 8592 - RNA, 12 nt, Artificial Sequence
  Synthetic
auggcagaaaac

SEQ ID NO: 8593 - RNA, 12 nt, Artificial Sequence
  Synthetic
cauggcagaaaa

SEQ ID NO: 8594 - RNA, 12 nt, Artificial Sequence
  Synthetic
gcauggcagaaa

SEQ ID NO: 8595 - RNA, 12 nt, Artificial Sequence
  Synthetic
ugcauggcagaa

SEQ ID NO: 8596 - RNA, 12 nt, Artificial Sequence
  Synthetic
augcauggcaga

SEQ ID NO: 8597 - RNA, 12 nt, Artificial Sequence
  Synthetic
caugcauggcag

SEQ ID NO: 8598 - RNA, 12 nt, Artificial Sequence
  Synthetic
ucaugcauggca

SEQ ID NO: 8599 - RNA, 12 nt, Artificial Sequence
  Synthetic
cucaugcauggc

SEQ ID NO: 8600 - RNA, 12 nt, Artificial Sequence
  Synthetic
acucaugcaugg

SEQ ID NO: 8601 - RNA, 12 nt, Artificial Sequence
  Synthetic
aacucaugcaug

SEQ ID NO: 8602 - RNA, 12 nt, Artificial Sequence
  Synthetic
gaacucaugcau

SEQ ID NO: 8603 - RNA, 12 nt, Artificial Sequence
  Synthetic
ggaacucaugca

SEQ ID NO: 8604 - RNA, 12 nt, Artificial Sequence
  Synthetic
uggaacucaugc

SEQ ID NO: 8605 - RNA, 12 nt, Artificial Sequence
  Synthetic
cuggaacucaug

SEQ ID NO: 8606 - RNA, 12 nt, Artificial Sequence
  Synthetic
ucuggaacucau

SEQ ID NO: 8607 - RNA, 12 nt, Artificial Sequence
  Synthetic
uucuggaacuca

SEQ ID NO: 8608 - RNA, 12 nt, Artificial Sequence
  Synthetic
guucuggaacuc

SEQ ID NO: 8609 - RNA, 12 nt, Artificial Sequence
  Synthetic
gguucuggaacu

SEQ ID NO: 8610 - RNA, 12 nt, Artificial Sequence
  Synthetic
agguucuggaac

SEQ ID NO: 8611 - RNA, 12 nt, Artificial Sequence
  Synthetic
gagguucuggaa

SEQ ID NO: 8612 - RNA, 12 nt, Artificial Sequence
  Synthetic
ggagguucugga

SEQ ID NO: 8613 - RNA, 12 nt, Artificial Sequence
  Synthetic
uggagguucugg

SEQ ID NO: 8614 - RNA, 12 nt, Artificial Sequence
  Synthetic
auggagguucug

SEQ ID NO: 8615 - RNA, 12 nt, Artificial Sequence
  Synthetic
cauggagguucu

SEQ ID NO: 8616 - RNA, 12 nt, Artificial Sequence
  Synthetic
gcauggagguuc

SEQ ID NO: 8617 - RNA, 12 nt, Artificial Sequence
  Synthetic
agcauggagguu

SEQ ID NO: 8618 - RNA, 12 nt, Artificial Sequence
  Synthetic
gagcauggaggu

SEQ ID NO: 8619 - RNA, 12 nt, Artificial Sequence
  Synthetic
ugagcauggagg

SEQ ID NO: 8620 - RNA, 12 nt, Artificial Sequence
  Synthetic
cugagcauggag

SEQ ID NO: 8621 - RNA, 12 nt, Artificial Sequence
  Synthetic
ucugagcaugga

SEQ ID NO: 8622 - RNA, 12 nt, Artificial Sequence
  Synthetic
cucugagcaugg

SEQ ID NO: 8623 - RNA, 12 nt, Artificial Sequence
  Synthetic
gcucugagcaug

SEQ ID NO: 8624 - RNA, 12 nt, Artificial Sequence
  Synthetic
ugcucugagcau

SEQ ID NO: 8625 - RNA, 12 nt, Artificial Sequence
  Synthetic
uugcucugagca

SEQ ID NO: 8626 - RNA, 12 nt, Artificial Sequence
  Synthetic
cuugcucugagc

SEQ ID NO: 8627 - RNA, 12 nt, Artificial Sequence
  Synthetic
ccuugcucugag

SEQ ID NO: 8628 - RNA, 12 nt, Artificial Sequence
  Synthetic
gccuugcucuga

SEQ ID NO: 8629 - RNA, 12 nt, Artificial Sequence
  Synthetic
agccuugcucug

SEQ ID NO: 8630 - RNA, 12 nt, Artificial Sequence
  Synthetic
gagccuugcucu

SEQ ID NO: 8631 - RNA, 12 nt, Artificial Sequence
  Synthetic
cgagccuugcuc

SEQ ID NO: 8632 - RNA, 12 nt, Artificial Sequence
  Synthetic
ucgagccuugcu

SEQ ID NO: 8633 - RNA, 12 nt, Artificial Sequence
  Synthetic
uucgagccuugc

SEQ ID NO: 8634 - RNA, 12 nt, Artificial Sequence
  Synthetic
auucgagccuug

SEQ ID NO: 8635 - RNA, 12 nt, Artificial Sequence
  Synthetic
gauucgagccuu

SEQ ID NO: 8636 - RNA, 12 nt, Artificial Sequence
  Synthetic
ggauucgagccu

SEQ ID NO: 8637 - RNA, 12 nt, Artificial Sequence
  Synthetic
uggauucgagcc

SEQ ID NO: 8638 - RNA, 12 nt, Artificial Sequence
  Synthetic
cuggauucgagc

SEQ ID NO: 8639 - RNA, 12 nt, Artificial Sequence
  Synthetic
ccuggauucgag

SEQ ID NO: 8640 - RNA, 12 nt, Artificial Sequence
  Synthetic
uccuggauucga

SEQ ID NO: 8641 - RNA, 12 nt, Artificial Sequence
  Synthetic
cuccuggauucg

SEQ ID NO: 8642 - RNA, 12 nt, Artificial Sequence
  Synthetic
acuccuggauuc

SEQ ID NO: 8643 - RNA, 12 nt, Artificial Sequence
  Synthetic
aacuccuggauu

SEQ ID NO: 8644 - RNA, 12 nt, Artificial Sequence
  Synthetic
aaacuccuggau

SEQ ID NO: 8645 - RNA, 12 nt, Artificial Sequence
  Synthetic
caaacuccugga

SEQ ID NO: 8646 - RNA, 12 nt, Artificial Sequence
  Synthetic
acaaacuccugg

SEQ ID NO: 8647 - RNA, 12 nt, Artificial Sequence
  Synthetic
cacaaacuccug

SEQ ID NO: 8648 - RNA, 12 nt, Artificial Sequence
  Synthetic
gcacaaacuccu

SEQ ID NO: 8649 - RNA, 12 nt, Artificial Sequence
  Synthetic
cgcacaaacucc

SEQ ID NO: 8650 - RNA, 12 nt, Artificial Sequence
  Synthetic
ccgcacaaacuc

SEQ ID NO: 8651 - RNA, 12 nt, Artificial Sequence
  Synthetic
cccgcacaaacu

SEQ ID NO: 8652 - RNA, 12 nt, Artificial Sequence
  Synthetic
ccccgcacaaac

SEQ ID NO: 8653 - RNA, 12 nt, Artificial Sequence
  Synthetic
gccccgcacaaa

SEQ ID NO: 8654 - RNA, 12 nt, Artificial Sequence
  Synthetic
ggccccgcacaa

SEQ ID NO: 8655 - RNA, 12 nt, Artificial Sequence
  Synthetic
uggccccgcaca

SEQ ID NO: 8656 - RNA, 12 nt, Artificial Sequence
  Synthetic
auggccccgcac

SEQ ID NO: 8657 - RNA, 12 nt, Artificial Sequence
  Synthetic
aauggccccgca

SEQ ID NO: 8658 - RNA, 12 nt, Artificial Sequence
  Synthetic
aaauggccccgc

SEQ ID NO: 8659 - RNA, 12 nt, Artificial Sequence
  Synthetic
aaaauggccccg

SEQ ID NO: 8660 - RNA, 12 nt, Artificial Sequence
  Synthetic
aaaaauggcccc

SEQ ID NO: 8661 - RNA, 12 nt, Artificial Sequence
  Synthetic
uaaaaauggccc

SEQ ID NO: 8662 - RNA, 12 nt, Artificial Sequence
  Synthetic
auaaaaauggcc

SEQ ID NO: 8663 - RNA, 12 nt, Artificial Sequence
  Synthetic
cauaaaaauggc

SEQ ID NO: 8664 - RNA, 12 nt, Artificial Sequence
  Synthetic
ccauaaaaaugg

SEQ ID NO: 8665 - RNA, 12 nt, Artificial Sequence
  Synthetic
cccauaaaaaug

SEQ ID NO: 8666 - RNA, 12 nt, Artificial Sequence
  Synthetic
gcccauaaaaau

SEQ ID NO: 8667 - RNA, 12 nt, Artificial Sequence
  Synthetic
ugcccauaaaaa

SEQ ID NO: 8668 - RNA, 12 nt, Artificial Sequence
  Synthetic
augcccauaaaa

SEQ ID NO: 8669 - RNA, 12 nt, Artificial Sequence
  Synthetic
gaugcccauaaa

SEQ ID NO: 8670 - RNA, 12 nt, Artificial Sequence
  Synthetic
agaugcccauaa

SEQ ID NO: 8671 - RNA, 12 nt, Artificial Sequence
  Synthetic
cagaugcccaua

SEQ ID NO: 8672 - RNA, 12 nt, Artificial Sequence
  Synthetic
ccagaugcccau

SEQ ID NO: 8673 - RNA, 12 nt, Artificial Sequence
  Synthetic
uccagaugccca

SEQ ID NO: 8674 - RNA, 12 nt, Artificial Sequence
  Synthetic
guccagaugccc

SEQ ID NO: 8675 - RNA, 12 nt, Artificial Sequence
  Synthetic
aguccagaugcc

SEQ ID NO: 8676 - RNA, 12 nt, Artificial Sequence
  Synthetic
aaguccagaugc

SEQ ID NO: 8677 - RNA, 12 nt, Artificial Sequence
  Synthetic
gaaguccagaug

SEQ ID NO: 8678 - RNA, 12 nt, Artificial Sequence
  Synthetic
ugaaguccagau

SEQ ID NO: 8679 - RNA, 12 nt, Artificial Sequence
  Synthetic
uugaaguccaga

SEQ ID NO: 8680 - RNA, 12 nt, Artificial Sequence
  Synthetic
guugaaguccag

SEQ ID NO: 8681 - RNA, 12 nt, Artificial Sequence
  Synthetic
aguugaagucca

SEQ ID NO: 8682 - RNA, 12 nt, Artificial Sequence
  Synthetic
aaguugaagucc

SEQ ID NO: 8683 - RNA, 12 nt, Artificial Sequence
  Synthetic
caaguugaaguc

SEQ ID NO: 8684 - RNA, 12 nt, Artificial Sequence
  Synthetic
ccaaguugaagu

SEQ ID NO: 8685 - RNA, 12 nt, Artificial Sequence
  Synthetic
uccaaguugaag

SEQ ID NO: 8686 - RNA, 12 nt, Artificial Sequence
  Synthetic
guccaaguugaa

SEQ ID NO: 8687 - RNA, 12 nt, Artificial Sequence
  Synthetic
uguccaaguuga

SEQ ID NO: 8688 - RNA, 12 nt, Artificial Sequence
  Synthetic
uuguccaaguug

SEQ ID NO: 8689 - RNA, 12 nt, Artificial Sequence
  Synthetic
cuuguccaaguu

SEQ ID NO: 8690 - RNA, 12 nt, Artificial Sequence
  Synthetic
ucuuguccaagu

SEQ ID NO: 8691 - RNA, 12 nt, Artificial Sequence
  Synthetic
gucuuguccaag

SEQ ID NO: 8692 - RNA, 12 nt, Artificial Sequence
  Synthetic
ggucuuguccaa

SEQ ID NO: 8693 - RNA, 12 nt, Artificial Sequence
  Synthetic
aggucuugucca

SEQ ID NO: 8694 - RNA, 12 nt, Artificial Sequence
  Synthetic
aaggucuugucc

SEQ ID NO: 8695 - RNA, 12 nt, Artificial Sequence
  Synthetic
uaaggucuuguc

SEQ ID NO: 8696 - RNA, 12 nt, Artificial Sequence
  Synthetic
auaaggucuugu

SEQ ID NO: 8697 - RNA, 12 nt, Artificial Sequence
  Synthetic
uauaaggucuug

SEQ ID NO: 8698 - RNA, 12 nt, Artificial Sequence
  Synthetic
guauaaggucuu

SEQ ID NO: 8699 - RNA, 12 nt, Artificial Sequence
  Synthetic
aguauaaggucu

SEQ ID NO: 8700 - RNA, 12 nt, Artificial Sequence
  Synthetic
aaguauaagguc

SEQ ID NO: 8701 - RNA, 12 nt, Artificial Sequence
  Synthetic
gaaguauaaggu

SEQ ID NO: 8702 - RNA, 12 nt, Artificial Sequence
  Synthetic
agaaguauaagg

SEQ ID NO: 8703 - RNA, 12 nt, Artificial Sequence
  Synthetic
aagaaguauaag

SEQ ID NO: 8704 - RNA, 12 nt, Artificial Sequence
  Synthetic
aaagaaguauaa

SEQ ID NO: 8705 - RNA, 12 nt, Artificial Sequence
  Synthetic
uaaagaaguaua

SEQ ID NO: 8706 - RNA, 12 nt, Artificial Sequence
  Synthetic
auaaagaaguau

SEQ ID NO: 8707 - RNA, 12 nt, Artificial Sequence
  Synthetic
gauaaagaagua

SEQ ID NO: 8708 - RNA, 12 nt, Artificial Sequence
  Synthetic
cgauaaagaagu

SEQ ID NO: 8709 - RNA, 12 nt, Artificial Sequence
  Synthetic
gcgauaaagaag

SEQ ID NO: 8710 - RNA, 12 nt, Artificial Sequence
  Synthetic
ggcgauaaagaa

SEQ ID NO: 8711 - RNA, 12 nt, Artificial Sequence
  Synthetic
cggcgauaaaga

SEQ ID NO: 8712 - RNA, 12 nt, Artificial Sequence
  Synthetic
ccggcgauaaag

SEQ ID NO: 8713 - RNA, 12 nt, Artificial Sequence
  Synthetic
gccggcgauaaa

SEQ ID NO: 8714 - RNA, 12 nt, Artificial Sequence
  Synthetic
ggccggcgauaa

SEQ ID NO: 8715 - RNA, 12 nt, Artificial Sequence
  Synthetic
cggccggcgaua

SEQ ID NO: 8716 - RNA, 12 nt, Artificial Sequence
  Synthetic
gcggccggcgau

SEQ ID NO: 8717 - RNA, 12 nt, Artificial Sequence
  Synthetic
agcggccggcga

SEQ ID NO: 8718 - RNA, 12 nt, Artificial Sequence
  Synthetic
uagcggccggcg

SEQ ID NO: 8719 - RNA, 12 nt, Artificial Sequence
  Synthetic
auagcggccggc

SEQ ID NO: 8720 - RNA, 12 nt, Artificial Sequence
  Synthetic
cauagcggccgg

SEQ ID NO: 8721 - RNA, 12 nt, Artificial Sequence
  Synthetic
ucauagcggccg

SEQ ID NO: 8722 - RNA, 12 nt, Artificial Sequence
  Synthetic
cucauagcggcc

SEQ ID NO: 8723 - RNA, 12 nt, Artificial Sequence
  Synthetic
acucauagcggc

SEQ ID NO: 8724 - RNA, 12 nt, Artificial Sequence
  Synthetic
aacucauagcgg

SEQ ID NO: 8725 - RNA, 12 nt, Artificial Sequence
  Synthetic
gaacucauagcg

SEQ ID NO: 8726 - RNA, 12 nt, Artificial Sequence
  Synthetic
agaacucauagc

SEQ ID NO: 8727 - RNA, 12 nt, Artificial Sequence
  Synthetic
gagaacucauag

SEQ ID NO: 8728 - RNA, 12 nt, Artificial Sequence
  Synthetic
ggagaacucaua

SEQ ID NO: 8729 - RNA, 12 nt, Artificial Sequence
  Synthetic
uggagaacucau

SEQ ID NO: 8730 - RNA, 12 nt, Artificial Sequence
  Synthetic
uuggagaacuca

SEQ ID NO: 8731 - RNA, 12 nt, Artificial Sequence
  Synthetic
guuggagaacuc

SEQ ID NO: 8732 - RNA, 12 nt, Artificial Sequence
  Synthetic
uguuggagaacu

SEQ ID NO: 8733 - RNA, 12 nt, Artificial Sequence
  Synthetic
uuguuggagaac

SEQ ID NO: 8734 - RNA, 12 nt, Artificial Sequence
  Synthetic
cuuguuggagaa

SEQ ID NO: 8735 - RNA, 12 nt, Artificial Sequence
  Synthetic
ccuuguuggaga

SEQ ID NO: 8736 - RNA, 12 nt, Artificial Sequence
  Synthetic
cccuuguuggag

SEQ ID NO: 8737 - RNA, 12 nt, Artificial Sequence
  Synthetic
acccuuguugga

SEQ ID NO: 8738 - RNA, 12 nt, Artificial Sequence
  Synthetic
cacccuuguugg

SEQ ID NO: 8739 - RNA, 12 nt, Artificial Sequence
  Synthetic
gcacccuuguug

SEQ ID NO: 8740 - RNA, 12 nt, Artificial Sequence
  Synthetic
agcacccuuguu

SEQ ID NO: 8741 - RNA, 12 nt, Artificial Sequence
  Synthetic
cagcacccuugu

SEQ ID NO: 8742 - RNA, 12 nt, Artificial Sequence
  Synthetic
ucagcacccuug

SEQ ID NO: 8743 - RNA, 12 nt, Artificial Sequence
  Synthetic
gucagcacccuu

SEQ ID NO: 8744 - RNA, 12 nt, Artificial Sequence
  Synthetic
cgucagcacccu

SEQ ID NO: 8745 - RNA, 12 nt, Artificial Sequence
  Synthetic
acgucagcaccc

SEQ ID NO: 8746 - RNA, 12 nt, Artificial Sequence
  Synthetic
gacgucagcacc

SEQ ID NO: 8747 - RNA, 12 nt, Artificial Sequence
  Synthetic
agacgucagcac

SEQ ID NO: 8748 - RNA, 12 nt, Artificial Sequence
  Synthetic
aagacgucagca

SEQ ID NO: 8749 - RNA, 12 nt, Artificial Sequence
  Synthetic
gaagacgucagc

SEQ ID NO: 8750 - RNA, 12 nt, Artificial Sequence
  Synthetic
ggaagacgucag

SEQ ID NO: 8751 - RNA, 12 nt, Artificial Sequence
  Synthetic
aggaagacguca

SEQ ID NO: 8752 - RNA, 12 nt, Artificial Sequence
  Synthetic
caggaagacguc

SEQ ID NO: 8753 - RNA, 12 nt, Artificial Sequence
  Synthetic
ccaggaagacgu

SEQ ID NO: 8754 - RNA, 12 nt, Artificial Sequence
  Synthetic
uccaggaagacg

SEQ ID NO: 8755 - RNA, 12 nt, Artificial Sequence
  Synthetic
cuccaggaagac

SEQ ID NO: 8756 - RNA, 12 nt, Artificial Sequence
  Synthetic
ccuccaggaaga

SEQ ID NO: 8757 - RNA, 12 nt, Artificial Sequence
  Synthetic
gccuccaggaag

SEQ ID NO: 8758 - RNA, 12 nt, Artificial Sequence
  Synthetic
ugccuccaggaa

SEQ ID NO: 8759 - RNA, 12 nt, Artificial Sequence
  Synthetic
augccuccagga

SEQ ID NO: 8760 - RNA, 12 nt, Artificial Sequence
  Synthetic
aaugccuccagg

SEQ ID NO: 8761 - RNA, 12 nt, Artificial Sequence
  Synthetic
caaugccuccag

SEQ ID NO: 8762 - RNA, 12 nt, Artificial Sequence
  Synthetic
ccaaugccucca

SEQ ID NO: 8763 - RNA, 12 nt, Artificial Sequence
  Synthetic
gccaaugccucc

SEQ ID NO: 8764 - RNA, 12 nt, Artificial Sequence
  Synthetic
agccaaugccuc

SEQ ID NO: 8765 - RNA, 12 nt, Artificial Sequence
  Synthetic
gagccaaugccu

SEQ ID NO: 8766 - RNA, 12 nt, Artificial Sequence
  Synthetic
cgagccaaugcc

SEQ ID NO: 8767 - RNA, 12 nt, Artificial Sequence
  Synthetic
ccgagccaaugc

SEQ ID NO: 8768 - RNA, 12 nt, Artificial Sequence
  Synthetic
gccgagccaaug

SEQ ID NO: 8769 - RNA, 12 nt, Artificial Sequence
  Synthetic
agccgagccaau

SEQ ID NO: 8770 - RNA, 12 nt, Artificial Sequence
  Synthetic
gagccgagccaa

SEQ ID NO: 8771 - RNA, 12 nt, Artificial Sequence
  Synthetic
ugagccgagcca

SEQ ID NO: 8772 - RNA, 12 nt, Artificial Sequence
  Synthetic
uugagccgagcc

SEQ ID NO: 8773 - RNA, 12 nt, Artificial Sequence
  Synthetic
guugagccgagc

SEQ ID NO: 8774 - RNA, 12 nt, Artificial Sequence
  Synthetic
aguugagccgag

SEQ ID NO: 8775 - RNA, 12 nt, Artificial Sequence
  Synthetic
uaguugagccga

SEQ ID NO: 8776 - RNA, 12 nt, Artificial Sequence
  Synthetic
auaguugagccg

SEQ ID NO: 8777 - RNA, 12 nt, Artificial Sequence
  Synthetic
gauaguugagcc

SEQ ID NO: 8778 - RNA, 12 nt, Artificial Sequence
  Synthetic
agauaguugagc

SEQ ID NO: 8779 - RNA, 12 nt, Artificial Sequence
  Synthetic
cagauaguugag

SEQ ID NO: 8780 - RNA, 12 nt, Artificial Sequence
  Synthetic
gcagauaguuga

SEQ ID NO: 8781 - RNA, 12 nt, Artificial Sequence
  Synthetic
agcagauaguug

SEQ ID NO: 8782 - RNA, 12 nt, Artificial Sequence
  Synthetic
gagcagauaguu

SEQ ID NO: 8783 - RNA, 12 nt, Artificial Sequence
  Synthetic
ugagcagauagu

SEQ ID NO: 8784 - RNA, 12 nt, Artificial Sequence
  Synthetic
cugagcagauag

SEQ ID NO: 8785 - RNA, 12 nt, Artificial Sequence
  Synthetic
ucugagcagaua

SEQ ID NO: 8786 - RNA, 12 nt, Artificial Sequence
  Synthetic
cucugagcagau

SEQ ID NO: 8787 - RNA, 12 nt, Artificial Sequence
  Synthetic
acucugagcaga

SEQ ID NO: 8788 - RNA, 12 nt, Artificial Sequence
  Synthetic
cacucugagcag

SEQ ID NO: 8789 - RNA, 12 nt, Artificial Sequence
  Synthetic
ucacucugagca

SEQ ID NO: 8790 - RNA, 12 nt, Artificial Sequence
  Synthetic
uucacucugagc

SEQ ID NO: 8791 - RNA, 12 nt, Artificial Sequence
  Synthetic
guucacucugag

SEQ ID NO: 8792 - RNA, 12 nt, Artificial Sequence
  Synthetic
cguucacucuga

SEQ ID NO: 8793 - RNA, 12 nt, Artificial Sequence
  Synthetic
ccguucacucug

SEQ ID NO: 8794 - RNA, 12 nt, Artificial Sequence
  Synthetic
gccguucacucu

SEQ ID NO: 8795 - RNA, 12 nt, Artificial Sequence
  Synthetic
ugccguucacuc

SEQ ID NO: 8796 - RNA, 12 nt, Artificial Sequence
  Synthetic
cugccguucacu

SEQ ID NO: 8797 - RNA, 12 nt, Artificial Sequence
  Synthetic
gcugccguucac

SEQ ID NO: 8798 - RNA, 12 nt, Artificial Sequence
  Synthetic
cgcugccguuca

SEQ ID NO: 8799 - RNA, 12 nt, Artificial Sequence
  Synthetic
ucgcugccguuc

SEQ ID NO: 8800 - RNA, 12 nt, Artificial Sequence
  Synthetic
cucgcugccguu

SEQ ID NO: 8801 - RNA, 12 nt, Artificial Sequence
  Synthetic
gcucgcugccgu

SEQ ID NO: 8802 - RNA, 12 nt, Artificial Sequence
  Synthetic
ugcucgcugccg

SEQ ID NO: 8803 - RNA, 12 nt, Artificial Sequence
  Synthetic
cugcucgcugcc

SEQ ID NO: 8804 - RNA, 12 nt, Artificial Sequence
  Synthetic
ucugcucgcugc

SEQ ID NO: 8805 - RNA, 12 nt, Artificial Sequence
  Synthetic
gucugcucgcug

SEQ ID NO: 8806 - RNA, 12 nt, Artificial Sequence
  Synthetic
ugucugcucgcu

SEQ ID NO: 8807 - RNA, 12 nt, Artificial Sequence
  Synthetic
cugucugcucgc

SEQ ID NO: 8808 - RNA, 12 nt, Artificial Sequence
  Synthetic
acugucugcucg

SEQ ID NO: 8809 - RNA, 12 nt, Artificial Sequence
  Synthetic
cacugucugcuc

SEQ ID NO: 8810 - RNA, 12 nt, Artificial Sequence
  Synthetic
ccacugucugcu

SEQ ID NO: 8811 - RNA, 12 nt, Artificial Sequence
  Synthetic
accacugucugc

SEQ ID NO: 8812 - RNA, 12 nt, Artificial Sequence
  Synthetic
aaccacugucug

SEQ ID NO: 8813 - RNA, 12 nt, Artificial Sequence
  Synthetic
caaccacugucu

SEQ ID NO: 8814 - RNA, 12 nt, Artificial Sequence
  Synthetic
gcaaccacuguc

SEQ ID NO: 8815 - RNA, 12 nt, Artificial Sequence
  Synthetic
ggcaaccacugu

SEQ ID NO: 8816 - RNA, 12 nt, Artificial Sequence
  Synthetic
aggcaaccacug

SEQ ID NO: 8817 - RNA, 12 nt, Artificial Sequence
  Synthetic
aaggcaaccacu

SEQ ID NO: 8818 - RNA, 12 nt, Artificial Sequence
  Synthetic
gaaggcaaccac

SEQ ID NO: 8819 - RNA, 12 nt, Artificial Sequence
  Synthetic
agaaggcaacca

SEQ ID NO: 8820 - RNA, 12 nt, Artificial Sequence
  Synthetic
aagaaggcaacc

SEQ ID NO: 8821 - RNA, 12 nt, Artificial Sequence
  Synthetic
gaagaaggcaac

SEQ ID NO: 8822 - RNA, 12 nt, Artificial Sequence
  Synthetic
ugaagaaggcaa

SEQ ID NO: 8823 - RNA, 12 nt, Artificial Sequence
  Synthetic
augaagaaggca

SEQ ID NO: 8824 - RNA, 12 nt, Artificial Sequence
  Synthetic
gaugaagaaggc

SEQ ID NO: 8825 - RNA, 12 nt, Artificial Sequence
  Synthetic
ugaugaagaagg

SEQ ID NO: 8826 - RNA, 12 nt, Artificial Sequence
  Synthetic
augaugaagaag

SEQ ID NO: 8827 - RNA, 12 nt, Artificial Sequence
  Synthetic
caugaugaagaa

SEQ ID NO: 8828 - RNA, 12 nt, Artificial Sequence
  Synthetic
gcaugaugaaga

SEQ ID NO: 8829 - RNA, 12 nt, Artificial Sequence
  Synthetic
ggcaugaugaag

SEQ ID NO: 8830 - RNA, 12 nt, Artificial Sequence
  Synthetic
uggcaugaugaa

SEQ ID NO: 8831 - RNA, 12 nt, Artificial Sequence
  Synthetic
cuggcaugauga

SEQ ID NO: 8832 - RNA, 12 nt, Artificial Sequence
  Synthetic
gcuggcaugaug

SEQ ID NO: 8833 - RNA, 12 nt, Artificial Sequence
  Synthetic
cgcuggcaugau

SEQ ID NO: 8834 - RNA, 12 nt, Artificial Sequence
  Synthetic
gcgcuggcauga

SEQ ID NO: 8835 - RNA, 12 nt, Artificial Sequence
  Synthetic
cgcgcuggcaug

SEQ ID NO: 8836 - RNA, 12 nt, Artificial Sequence
  Synthetic
ccgcgcuggcau

SEQ ID NO: 8837 - RNA, 12 nt, Artificial Sequence
  Synthetic
uccgcgcuggca

SEQ ID NO: 8838 - RNA, 12 nt, Artificial Sequence
  Synthetic
guccgcgcuggc

SEQ ID NO: 8839 - RNA, 12 nt, Artificial Sequence
  Synthetic
gguccgcgcugg

SEQ ID NO: 8840 - RNA, 12 nt, Artificial Sequence
  Synthetic
ugguccgcgcug

SEQ ID NO: 8841 - RNA, 12 nt, Artificial Sequence
  Synthetic
uugguccgcgcu

SEQ ID NO: 8842 - RNA, 12 nt, Artificial Sequence
  Synthetic
guugguccgcgc

SEQ ID NO: 8843 - RNA, 12 nt, Artificial Sequence
  Synthetic
uguugguccgcg

SEQ ID NO: 8844 - RNA, 12 nt, Artificial Sequence
  Synthetic
uuguugguccgc

SEQ ID NO: 8845 - RNA, 12 nt, Artificial Sequence
  Synthetic
auuguugguccg

SEQ ID NO: 8846 - RNA, 12 nt, Artificial Sequence
  Synthetic
aauuguuggucc

SEQ ID NO: 8847 - RNA, 12 nt, Artificial Sequence
  Synthetic
aaauuguugguc

SEQ ID NO: 8848 - RNA, 12 nt, Artificial Sequence
  Synthetic
gaaauuguuggu

SEQ ID NO: 8849 - RNA, 12 nt, Artificial Sequence
  Synthetic
ugaaauuguugg

SEQ ID NO: 8850 - RNA, 12 nt, Artificial Sequence
  Synthetic
uugaaauuguug

SEQ ID NO: 8851 - RNA, 12 nt, Artificial Sequence
  Synthetic
guugaaauuguu

SEQ ID NO: 8852 - RNA, 12 nt, Artificial Sequence
  Synthetic
cguugaaauugu

SEQ ID NO: 8853 - RNA, 12 nt, Artificial Sequence
  Synthetic
acguugaaauug

SEQ ID NO: 8854 - RNA, 12 nt, Artificial Sequence
  Synthetic
cacguugaaauu

SEQ ID NO: 8855 - RNA, 12 nt, Artificial Sequence
  Synthetic
ccacguugaaau

SEQ ID NO: 8856 - RNA, 12 nt, Artificial Sequence
  Synthetic
uccacguugaaa

SEQ ID NO: 8857 - RNA, 12 nt, Artificial Sequence
  Synthetic
uuccacguugaa

SEQ ID NO: 8858 - RNA, 12 nt, Artificial Sequence
  Synthetic
uuuccacguuga

SEQ ID NO: 8859 - RNA, 12 nt, Artificial Sequence
  Synthetic
guuuccacguug

SEQ ID NO: 8860 - RNA, 12 nt, Artificial Sequence
  Synthetic
gguuuccacguu

SEQ ID NO: 8861 - RNA, 12 nt, Artificial Sequence
  Synthetic
ggguuuccacgu

SEQ ID NO: 8862 - RNA, 12 nt, Artificial Sequence
  Synthetic
aggguuuccacg

SEQ ID NO: 8863 - RNA, 12 nt, Artificial Sequence
  Synthetic
gaggguuuccac

SEQ ID NO: 8864 - RNA, 12 nt, Artificial Sequence
  Synthetic
ugaggguuucca

SEQ ID NO: 8865 - RNA, 12 nt, Artificial Sequence
  Synthetic
uugaggguuucc

SEQ ID NO: 8866 - RNA, 12 nt, Artificial Sequence
  Synthetic
uuugaggguuuc

SEQ ID NO: 8867 - RNA, 12 nt, Artificial Sequence
  Synthetic
cuuugaggguuu

SEQ ID NO: 8868 - RNA, 12 nt, Artificial Sequence
  Synthetic
ccuuugaggguu

SEQ ID NO: 8869 - RNA, 12 nt, Artificial Sequence
  Synthetic
gccuuugagggu

SEQ ID NO: 8870 - RNA, 12 nt, Artificial Sequence
  Synthetic
ggccuuugaggg

SEQ ID NO: 8871 - RNA, 12 nt, Artificial Sequence
  Synthetic
uggccuuugagg

SEQ ID NO: 8872 - RNA, 12 nt, Artificial Sequence
  Synthetic
uuggccuuugag

SEQ ID NO: 8873 - RNA, 12 nt, Artificial Sequence
  Synthetic
cuuggccuuuga

SEQ ID NO: 8874 - RNA, 12 nt, Artificial Sequence
  Synthetic
gcuuggccuuug

SEQ ID NO: 8875 - RNA, 12 nt, Artificial Sequence
  Synthetic
agcuuggccuuu

SEQ ID NO: 8876 - RNA, 12 nt, Artificial Sequence
  Synthetic
cagcuuggccuu

SEQ ID NO: 8877 - RNA, 12 nt, Artificial Sequence
  Synthetic
acagcuuggccu

SEQ ID NO: 8878 - RNA, 12 nt, Artificial Sequence
  Synthetic
cacagcuuggcc

SEQ ID NO: 8879 - RNA, 12 nt, Artificial Sequence
  Synthetic
gcacagcuuggc

SEQ ID NO: 8880 - RNA, 12 nt, Artificial Sequence
  Synthetic
cgcacagcuugg

SEQ ID NO: 8881 - RNA, 12 nt, Artificial Sequence
  Synthetic
gcgcacagcuug

SEQ ID NO: 8882 - RNA, 12 nt, Artificial Sequence
  Synthetic
ugcgcacagcuu

SEQ ID NO: 8883 - RNA, 12 nt, Artificial Sequence
  Synthetic
uugcgcacagcu

SEQ ID NO: 8884 - RNA, 12 nt, Artificial Sequence
  Synthetic
uuugcgcacagc

SEQ ID NO: 8885 - RNA, 12 nt, Artificial Sequence
  Synthetic
guuugcgcacag

SEQ ID NO: 8886 - RNA, 12 nt, Artificial Sequence
  Synthetic
uguuugcgcaca

SEQ ID NO: 8887 - RNA, 12 nt, Artificial Sequence
  Synthetic
cuguuugcgcac

SEQ ID NO: 8888 - RNA, 12 nt, Artificial Sequence
  Synthetic
gcuguuugcgca

SEQ ID NO: 8889 - RNA, 12 nt, Artificial Sequence
  Synthetic
agcuguuugcgc

SEQ ID NO: 8890 - RNA, 12 nt, Artificial Sequence
  Synthetic
aagcuguuugcg

SEQ ID NO: 8891 - RNA, 12 nt, Artificial Sequence
  Synthetic
aaagcuguuugc

SEQ ID NO: 8892 - RNA, 12 nt, Artificial Sequence
  Synthetic
caaagcuguuug

SEQ ID NO: 8893 - RNA, 12 nt, Artificial Sequence
  Synthetic
ccaaagcuguuu

SEQ ID NO: 8894 - RNA, 12 nt, Artificial Sequence
  Synthetic
cccaaagcuguu

SEQ ID NO: 8895 - RNA, 12 nt, Artificial Sequence
  Synthetic
ucccaaagcugu

SEQ ID NO: 8896 - RNA, 12 nt, Artificial Sequence
  Synthetic
gucccaaagcug

SEQ ID NO: 8897 - RNA, 12 nt, Artificial Sequence
  Synthetic
ugucccaaagcu

SEQ ID NO: 8898 - RNA, 12 nt, Artificial Sequence
  Synthetic
gugucccaaagc

SEQ ID NO: 8899 - RNA, 12 nt, Artificial Sequence
  Synthetic
cgugucccaaag

SEQ ID NO: 8900 - RNA, 12 nt, Artificial Sequence
  Synthetic
ccgugucccaaa

SEQ ID NO: 8901 - RNA, 12 nt, Artificial Sequence
  Synthetic
gccgugucccaa

SEQ ID NO: 8902 - RNA, 12 nt, Artificial Sequence
  Synthetic
ggccguguccca

SEQ ID NO: 8903 - RNA, 12 nt, Artificial Sequence
  Synthetic
uggccguguccc

SEQ ID NO: 8904 - RNA, 12 nt, Artificial Sequence
  Synthetic
uuggccgugucc

SEQ ID NO: 8905 - RNA, 12 nt, Artificial Sequence
  Synthetic
guuggccguguc

SEQ ID NO: 8906 - RNA, 12 nt, Artificial Sequence
  Synthetic
uguuggccgugu

SEQ ID NO: 8907 - RNA, 12 nt, Artificial Sequence
  Synthetic
guguuggccgug

SEQ ID NO: 8908 - RNA, 12 nt, Artificial Sequence
  Synthetic
cguguuggccgu

SEQ ID NO: 8909 - RNA, 12 nt, Artificial Sequence
  Synthetic
ccguguuggccg

SEQ ID NO: 8910 - RNA, 12 nt, Artificial Sequence
  Synthetic
accguguuggcc

SEQ ID NO: 8911 - RNA, 12 nt, Artificial Sequence
  Synthetic
caccguguuggc

SEQ ID NO: 8912 - RNA, 12 nt, Artificial Sequence
  Synthetic
ucaccguguugg

SEQ ID NO: 8913 - RNA, 12 nt, Artificial Sequence
  Synthetic
uucaccguguug

SEQ ID NO: 8914 - RNA, 12 nt, Artificial Sequence
  Synthetic
cuucaccguguu

SEQ ID NO: 8915 - RNA, 12 nt, Artificial Sequence
  Synthetic
ccuucaccgugu

SEQ ID NO: 8916 - RNA, 12 nt, Artificial Sequence
  Synthetic
uccuucaccgug

SEQ ID NO: 8917 - RNA, 12 nt, Artificial Sequence
  Synthetic
uuccuucaccgu

SEQ ID NO: 8918 - RNA, 12 nt, Artificial Sequence
  Synthetic
uuuccuucaccg

SEQ ID NO: 8919 - RNA, 12 nt, Artificial Sequence
  Synthetic
uuuuccuucacc

SEQ ID NO: 8920 - RNA, 12 nt, Artificial Sequence
  Synthetic
cuuuuccuucac

SEQ ID NO: 8921 - RNA, 12 nt, Artificial Sequence
  Synthetic
acuuuuccuuca

SEQ ID NO: 8922 - RNA, 12 nt, Artificial Sequence
  Synthetic
aacuuuuccuuc

SEQ ID NO: 8923 - RNA, 12 nt, Artificial Sequence
  Synthetic
gaacuuuuccuu

SEQ ID NO: 8924 - RNA, 12 nt, Artificial Sequence
  Synthetic
cgaacuuuuccu

SEQ ID NO: 8925 - RNA, 12 nt, Artificial Sequence
  Synthetic
ccgaacuuuucc

SEQ ID NO: 8926 - RNA, 12 nt, Artificial Sequence
  Synthetic
cccgaacuuuuc

SEQ ID NO: 8927 - RNA, 12 nt, Artificial Sequence
  Synthetic
ucccgaacuuuu

SEQ ID NO: 8928 - RNA, 12 nt, Artificial Sequence
  Synthetic
cucccgaacuuu

SEQ ID NO: 8929 - RNA, 12 nt, Artificial Sequence
  Synthetic
ccucccgaacuu

SEQ ID NO: 8930 - RNA, 12 nt, Artificial Sequence
  Synthetic
uccucccgaacu

SEQ ID NO: 8931 - RNA, 12 nt, Artificial Sequence
  Synthetic
uuccucccgaac

SEQ ID NO: 8932 - RNA, 12 nt, Artificial Sequence
  Synthetic
cuuccucccgaa

SEQ ID NO: 8933 - RNA, 12 nt, Artificial Sequence
  Synthetic
gcuuccucccga

SEQ ID NO: 8934 - RNA, 12 nt, Artificial Sequence
  Synthetic
agcuuccucccg

SEQ ID NO: 8935 - RNA, 12 nt, Artificial Sequence
  Synthetic
aagcuuccuccc

SEQ ID NO: 8936 - RNA, 12 nt, Artificial Sequence
  Synthetic
aaagcuuccucc

SEQ ID NO: 8937 - RNA, 12 nt, Artificial Sequence
  Synthetic
uaaagcuuccuc

SEQ ID NO: 8938 - RNA, 12 nt, Artificial Sequence
  Synthetic
auaaagcuuccu

SEQ ID NO: 8939 - RNA, 12 nt, Artificial Sequence
  Synthetic
cauaaagcuucc

SEQ ID NO: 8940 - RNA, 12 nt, Artificial Sequence
  Synthetic
ucauaaagcuuc

SEQ ID NO: 8941 - RNA, 12 nt, Artificial Sequence
  Synthetic
uucauaaagcuu

SEQ ID NO: 8942 - RNA, 12 nt, Artificial Sequence
  Synthetic
auucauaaagcu

SEQ ID NO: 8943 - RNA, 12 nt, Artificial Sequence
  Synthetic
gauucauaaagc

SEQ ID NO: 8944 - RNA, 12 nt, Artificial Sequence
  Synthetic
ggauucauaaag

SEQ ID NO: 8945 - RNA, 12 nt, Artificial Sequence
  Synthetic
aggauucauaaa

SEQ ID NO: 8946 - RNA, 12 nt, Artificial Sequence
  Synthetic
aaggauucauaa

SEQ ID NO: 8947 - RNA, 12 nt, Artificial Sequence
  Synthetic
uaaggauucaua

SEQ ID NO: 8948 - RNA, 12 nt, Artificial Sequence
  Synthetic
guaaggauucau

SEQ ID NO: 8949 - RNA, 12 nt, Artificial Sequence
  Synthetic
aguaaggauuca

SEQ ID NO: 8950 - RNA, 12 nt, Artificial Sequence
  Synthetic
caguaaggauuc

SEQ ID NO: 8951 - RNA, 12 nt, Artificial Sequence
  Synthetic
ccaguaaggauu

SEQ ID NO: 8952 - RNA, 12 nt, Artificial Sequence
  Synthetic
accaguaaggau

SEQ ID NO: 8953 - RNA, 12 nt, Artificial Sequence
  Synthetic
aaccaguaagga

SEQ ID NO: 8954 - RNA, 12 nt, Artificial Sequence
  Synthetic
caaccaguaagg

SEQ ID NO: 8955 - RNA, 12 nt, Artificial Sequence
  Synthetic
ccaaccaguaag

SEQ ID NO: 8956 - RNA, 12 nt, Artificial Sequence
  Synthetic
cccaaccaguaa

SEQ ID NO: 8957 - RNA, 12 nt, Artificial Sequence
  Synthetic
ucccaaccagua

SEQ ID NO: 8958 - RNA, 12 nt, Artificial Sequence
  Synthetic
cucccaaccagu

SEQ ID NO: 8959 - RNA, 12 nt, Artificial Sequence
  Synthetic
gcucccaaccag

SEQ ID NO: 8960 - RNA, 12 nt, Artificial Sequence
  Synthetic
ggcucccaacca

SEQ ID NO: 8961 - RNA, 12 nt, Artificial Sequence
  Synthetic
aggcucccaacc

SEQ ID NO: 8962 - RNA, 12 nt, Artificial Sequence
  Synthetic
aaggcucccaac

SEQ ID NO: 8963 - RNA, 12 nt, Artificial Sequence
  Synthetic
gaaggcucccaa

SEQ ID NO: 8964 - RNA, 12 nt, Artificial Sequence
  Synthetic
ggaaggcuccca

SEQ ID NO: 8965 - RNA, 12 nt, Artificial Sequence
  Synthetic
gggaaggcuccc

SEQ ID NO: 8966 - RNA, 12 nt, Artificial Sequence
  Synthetic
cgggaaggcucc

SEQ ID NO: 8967 - RNA, 12 nt, Artificial Sequence
  Synthetic
ucgggaaggcuc

SEQ ID NO: 8968 - RNA, 12 nt, Artificial Sequence
  Synthetic
gucgggaaggcu

SEQ ID NO: 8969 - RNA, 12 nt, Artificial Sequence
  Synthetic
ugucgggaaggc

SEQ ID NO: 8970 - RNA, 12 nt, Artificial Sequence
  Synthetic
augucgggaagg

SEQ ID NO: 8971 - RNA, 12 nt, Artificial Sequence
  Synthetic
caugucgggaag

SEQ ID NO: 8972 - RNA, 12 nt, Artificial Sequence
  Synthetic
ucaugucgggaa

SEQ ID NO: 8973 - RNA, 12 nt, Artificial Sequence
  Synthetic
uucaugucggga

SEQ ID NO: 8974 - RNA, 12 nt, Artificial Sequence
  Synthetic
guucaugucggg

SEQ ID NO: 8975 - RNA, 12 nt, Artificial Sequence
  Synthetic
uguucaugucgg

SEQ ID NO: 8976 - RNA, 12 nt, Artificial Sequence
  Synthetic
uuguucaugucg

SEQ ID NO: 8977 - RNA, 12 nt, Artificial Sequence
  Synthetic
cuuguucauguc

SEQ ID NO: 8978 - RNA, 12 nt, Artificial Sequence
  Synthetic
ucuuguucaugu

SEQ ID NO: 8979 - RNA, 12 nt, Artificial Sequence
  Synthetic
aucuuguucaug

SEQ ID NO: 8980 - RNA, 12 nt, Artificial Sequence
  Synthetic
caucuuguucau

SEQ ID NO: 8981 - RNA, 12 nt, Artificial Sequence
  Synthetic
gcaucuuguuca

SEQ ID NO: 8982 - RNA, 12 nt, Artificial Sequence
  Synthetic
agcaucuuguuc

SEQ ID NO: 8983 - RNA, 12 nt, Artificial Sequence
  Synthetic
cagcaucuuguu

SEQ ID NO: 8984 - RNA, 12 nt, Artificial Sequence
  Synthetic
ccagcaucuugu

SEQ ID NO: 8985 - RNA, 12 nt, Artificial Sequence
  Synthetic
uccagcaucuug

SEQ ID NO: 8986 - RNA, 12 nt, Artificial Sequence
  Synthetic
auccagcaucuu

SEQ ID NO: 8987 - RNA, 12 nt, Artificial Sequence
  Synthetic
uauccagcaucu

SEQ ID NO: 8988 - RNA, 12 nt, Artificial Sequence
  Synthetic
uuauccagcauc

SEQ ID NO: 8989 - RNA, 12 nt, Artificial Sequence
  Synthetic
cuuauccagcau

SEQ ID NO: 8990 - RNA, 12 nt, Artificial Sequence
  Synthetic
ccuuauccagca

SEQ ID NO: 8991 - RNA, 12 nt, Artificial Sequence
  Synthetic
uccuuauccagc

SEQ ID NO: 8992 - RNA, 12 nt, Artificial Sequence
  Synthetic
uuccuuauccag

SEQ ID NO: 8993 - RNA, 12 nt, Artificial Sequence
  Synthetic
cuuccuuaucca

SEQ ID NO: 8994 - RNA, 12 nt, Artificial Sequence
  Synthetic
ucuuccuuaucc

SEQ ID NO: 8995 - RNA, 12 nt, Artificial Sequence
  Synthetic
gucuuccuuauc

SEQ ID NO: 8996 - RNA, 12 nt, Artificial Sequence
  Synthetic
agucuuccuuau

SEQ ID NO: 8997 - RNA, 12 nt, Artificial Sequence
  Synthetic
aagucuuccuua

SEQ ID NO: 8998 - RNA, 12 nt, Artificial Sequence
  Synthetic
gaagucuuccuu

SEQ ID NO: 8999 - RNA, 12 nt, Artificial Sequence
  Synthetic
ugaagucuuccu

SEQ ID NO: 9000 - RNA, 12 nt, Artificial Sequence
  Synthetic
gugaagucuucc

SEQ ID NO: 9001 - RNA, 12 nt, Artificial Sequence
  Synthetic
agugaagucuuc

SEQ ID NO: 9002 - RNA, 12 nt, Artificial Sequence
  Synthetic
uagugaagucuu

SEQ ID NO: 9003 - RNA, 12 nt, Artificial Sequence
  Synthetic
auagugaagucu

SEQ ID NO: 9004 - RNA, 12 nt, Artificial Sequence
  Synthetic
cauagugaaguc

SEQ ID NO: 9005 - RNA, 12 nt, Artificial Sequence
  Synthetic
ucauagugaagu

SEQ ID NO: 9006 - RNA, 12 nt, Artificial Sequence
  Synthetic
aucauagugaag

SEQ ID NO: 9007 - RNA, 12 nt, Artificial Sequence
  Synthetic
caucauagugaa

SEQ ID NO: 9008 - RNA, 12 nt, Artificial Sequence
  Synthetic
ucaucauaguga

SEQ ID NO: 9009 - RNA, 12 nt, Artificial Sequence
  Synthetic
uucaucauagug

SEQ ID NO: 9010 - RNA, 12 nt, Artificial Sequence
  Synthetic
cuucaucauagu

SEQ ID NO: 9011 - RNA, 12 nt, Artificial Sequence
  Synthetic
ucuucaucauag

SEQ ID NO: 9012 - RNA, 12 nt, Artificial Sequence
  Synthetic
cucuucaucaua

SEQ ID NO: 9013 - RNA, 12 nt, Artificial Sequence
  Synthetic
ucucuucaucau

SEQ ID NO: 9014 - RNA, 12 nt, Artificial Sequence
  Synthetic
cucucuucauca

SEQ ID NO: 9015 - RNA, 12 nt, Artificial Sequence
  Synthetic
gcucucuucauc

SEQ ID NO: 9016 - RNA, 12 nt, Artificial Sequence
  Synthetic
ggcucucuucau

SEQ ID NO: 9017 - RNA, 12 nt, Artificial Sequence
  Synthetic
uggcucucuuca

SEQ ID NO: 9018 - RNA, 12 nt, Artificial Sequence
  Synthetic
auggcucucuuc

SEQ ID NO: 9019 - RNA, 12 nt, Artificial Sequence
  Synthetic
gauggcucucuu

SEQ ID NO: 9020 - RNA, 12 nt, Artificial Sequence
  Synthetic
agauggcucucu

SEQ ID NO: 9021 - RNA, 12 nt, Artificial Sequence
  Synthetic
aagauggcucuc

SEQ ID NO: 9022 - RNA, 12 nt, Artificial Sequence
  Synthetic
aaagauggcucu

SEQ ID NO: 9023 - RNA, 12 nt, Artificial Sequence
  Synthetic
caaagauggcuc

SEQ ID NO: 9024 - RNA, 12 nt, Artificial Sequence
  Synthetic
gcaaagauggcu

SEQ ID NO: 9025 - RNA, 12 nt, Artificial Sequence
  Synthetic
ugcaaagauggc

SEQ ID NO: 9026 - RNA, 12 nt, Artificial Sequence
  Synthetic
uugcaaagaugg

SEQ ID NO: 9027 - RNA, 12 nt, Artificial Sequence
  Synthetic
guugcaaagaug

SEQ ID NO: 9028 - RNA, 12 nt, Artificial Sequence
  Synthetic
cguugcaaagau

SEQ ID NO: 9029 - RNA, 12 nt, Artificial Sequence
  Synthetic
gcguugcaaaga

SEQ ID NO: 9030 - RNA, 12 nt, Artificial Sequence
  Synthetic
ugcguugcaaag

SEQ ID NO: 9031 - RNA, 12 nt, Artificial Sequence
  Synthetic
cugcguugcaaa

SEQ ID NO: 9032 - RNA, 12 nt, Artificial Sequence
  Synthetic
gcugcguugcaa

SEQ ID NO: 9033 - RNA, 12 nt, Artificial Sequence
  Synthetic
cgcugcguugca

SEQ ID NO: 9034 - RNA, 12 nt, Artificial Sequence
  Synthetic
ccgcugcguugc

SEQ ID NO: 9035 - RNA, 12 nt, Artificial Sequence
  Synthetic
gccgcugcguug

SEQ ID NO: 9036 - RNA, 12 nt, Artificial Sequence
  Synthetic
ugccgcugcguu

SEQ ID NO: 9037 - RNA, 12 nt, Artificial Sequence
  Synthetic
cugccgcugcgu

SEQ ID NO: 9038 - RNA, 12 nt, Artificial Sequence
  Synthetic
acugccgcugcg

SEQ ID NO: 9039 - RNA, 12 nt, Artificial Sequence
  Synthetic
gacugccgcugc

SEQ ID NO: 9040 - RNA, 12 nt, Artificial Sequence
  Synthetic
agacugccgcug

SEQ ID NO: 9041 - RNA, 12 nt, Artificial Sequence
  Synthetic
aagacugccgcu

SEQ ID NO: 9042 - RNA, 12 nt, Artificial Sequence
  Synthetic
aaagacugccgc

SEQ ID NO: 9043 - RNA, 12 nt, Artificial Sequence
  Synthetic
gaaagacugccg

SEQ ID NO: 9044 - RNA, 12 nt, Artificial Sequence
  Synthetic
ggaaagacugcc

SEQ ID NO: 9045 - RNA, 12 nt, Artificial Sequence
  Synthetic
gggaaagacugc

SEQ ID NO: 9046 - RNA, 12 nt, Artificial Sequence
  Synthetic
ggggaaagacug

SEQ ID NO: 9047 - RNA, 12 nt, Artificial Sequence
  Synthetic
gggggaaagacu

SEQ ID NO: 9048 - RNA, 12 nt, Artificial Sequence
  Synthetic
ggggggaaagac

SEQ ID NO: 9049 - RNA, 12 nt, Artificial Sequence
  Synthetic
aggggggaaaga

SEQ ID NO: 9050 - RNA, 12 nt, Artificial Sequence
  Synthetic
caggggggaaag

SEQ ID NO: 9051 - RNA, 12 nt, Artificial Sequence
  Synthetic
acaggggggaaa

SEQ ID NO: 9052 - RNA, 12 nt, Artificial Sequence
  Synthetic
cacaggggggaa

SEQ ID NO: 9053 - RNA, 12 nt, Artificial Sequence
  Synthetic
acacagggggga

SEQ ID NO: 9054 - RNA, 12 nt, Artificial Sequence
  Synthetic
cacacagggggg

SEQ ID NO: 9055 - RNA, 12 nt, Artificial Sequence
  Synthetic
gcacacaggggg

SEQ ID NO: 9056 - RNA, 12 nt, Artificial Sequence
  Synthetic
ugcacacagggg

SEQ ID NO: 9057 - RNA, 12 nt, Artificial Sequence
  Synthetic
gugcacacaggg

SEQ ID NO: 9058 - RNA, 12 nt, Artificial Sequence
  Synthetic
ggugcacacagg

SEQ ID NO: 9059 - RNA, 12 nt, Artificial Sequence
  Synthetic
gggugcacacag

SEQ ID NO: 9060 - RNA, 12 nt, Artificial Sequence
  Synthetic
ugggugcacaca

SEQ ID NO: 9061 - RNA, 12 nt, Artificial Sequence
  Synthetic
gugggugcacac

SEQ ID NO: 9062 - RNA, 12 nt, Artificial Sequence
  Synthetic
ugugggugcaca

SEQ ID NO: 9063 - RNA, 12 nt, Artificial Sequence
  Synthetic
uugugggugcac

SEQ ID NO: 9064 - RNA, 12 nt, Artificial Sequence
  Synthetic
auugugggugca

SEQ ID NO: 9065 - RNA, 12 nt, Artificial Sequence
  Synthetic
uauugugggugc

SEQ ID NO: 9066 - RNA, 12 nt, Artificial Sequence
  Synthetic
auauugugggug

SEQ ID NO: 9067 - RNA, 12 nt, Artificial Sequence
  Synthetic
cauauugugggu

SEQ ID NO: 9068 - RNA, 12 nt, Artificial Sequence
  Synthetic
gcauauuguggg

SEQ ID NO: 9069 - RNA, 12 nt, Artificial Sequence
  Synthetic
agcauauugugg

SEQ ID NO: 9070 - RNA, 12 nt, Artificial Sequence
  Synthetic
cagcauauugug

SEQ ID NO: 9071 - RNA, 12 nt, Artificial Sequence
  Synthetic
ccagcauauugu

SEQ ID NO: 9072 - RNA, 12 nt, Artificial Sequence
  Synthetic
uccagcauauug

SEQ ID NO: 9073 - RNA, 12 nt, Artificial Sequence
  Synthetic
auccagcauauu

SEQ ID NO: 9074 - RNA, 12 nt, Artificial Sequence
  Synthetic
cauccagcauau

SEQ ID NO: 9075 - RNA, 12 nt, Artificial Sequence
  Synthetic
ucauccagcaua

SEQ ID NO: 9076 - RNA, 12 nt, Artificial Sequence
  Synthetic
gucauccagcau

SEQ ID NO: 9077 - RNA, 12 nt, Artificial Sequence
  Synthetic
agucauccagca

SEQ ID NO: 9078 - RNA, 12 nt, Artificial Sequence
  Synthetic
gagucauccagc

SEQ ID NO: 9079 - RNA, 12 nt, Artificial Sequence
  Synthetic
ggagucauccag

SEQ ID NO: 9080 - RNA, 12 nt, Artificial Sequence
  Synthetic
aggagucaucca

SEQ ID NO: 9081 - RNA, 12 nt, Artificial Sequence
  Synthetic
gaggagucaucc

SEQ ID NO: 9082 - RNA, 12 nt, Artificial Sequence
  Synthetic
ugaggagucauc

SEQ ID NO: 9083 - RNA, 12 nt, Artificial Sequence
  Synthetic
cugaggagucau

SEQ ID NO: 9084 - RNA, 12 nt, Artificial Sequence
  Synthetic
ucugaggaguca

SEQ ID NO: 9085 - RNA, 12 nt, Artificial Sequence
  Synthetic
gucugaggaguc

SEQ ID NO: 9086 - RNA, 12 nt, Artificial Sequence
  Synthetic
ggucugaggagu

SEQ ID NO: 9087 - RNA, 12 nt, Artificial Sequence
  Synthetic
gggucugaggag

SEQ ID NO: 9088 - RNA, 12 nt, Artificial Sequence
  Synthetic
ggggucugagga

SEQ ID NO: 9089 - RNA, 12 nt, Artificial Sequence
  Synthetic
uggggucugagg

SEQ ID NO: 9090 - RNA, 12 nt, Artificial Sequence
  Synthetic
auggggucugag

SEQ ID NO: 9091 - RNA, 12 nt, Artificial Sequence
  Synthetic
gauggggucuga

SEQ ID NO: 9092 - RNA, 12 nt, Artificial Sequence
  Synthetic
ggauggggucug

SEQ ID NO: 9093 - RNA, 12 nt, Artificial Sequence
  Synthetic
aggauggggucu

SEQ ID NO: 9094 - RNA, 12 nt, Artificial Sequence
  Synthetic
caggaugggguc

SEQ ID NO: 9095 - RNA, 12 nt, Artificial Sequence
  Synthetic
ucaggauggggu

SEQ ID NO: 9096 - RNA, 12 nt, Artificial Sequence
  Synthetic
gucaggaugggg

SEQ ID NO: 9097 - RNA, 12 nt, Artificial Sequence
  Synthetic
ggucaggauggg

SEQ ID NO: 9098 - RNA, 12 nt, Artificial Sequence
  Synthetic
uggucaggaugg

SEQ ID NO: 9099 - RNA, 12 nt, Artificial Sequence
  Synthetic
guggucaggaug

SEQ ID NO: 9100 - RNA, 12 nt, Artificial Sequence
  Synthetic
gguggucaggau

SEQ ID NO: 9101 - RNA, 12 nt, Artificial Sequence
  Synthetic
ugguggucagga

SEQ ID NO: 9102 - RNA, 12 nt, Artificial Sequence
  Synthetic
augguggucagg

SEQ ID NO: 9103 - RNA, 12 nt, Artificial Sequence
  Synthetic
gaugguggucag

SEQ ID NO: 9104 - RNA, 12 nt, Artificial Sequence
  Synthetic
ggauggugguca

SEQ ID NO: 9105 - RNA, 12 nt, Artificial Sequence
  Synthetic
cggauggugguc

SEQ ID NO: 9106 - RNA, 12 nt, Artificial Sequence
  Synthetic
gcggaugguggu

SEQ ID NO: 9107 - RNA, 12 nt, Artificial Sequence
  Synthetic
ggcggauggugg

SEQ ID NO: 9108 - RNA, 12 nt, Artificial Sequence
  Synthetic
cggcggauggug

SEQ ID NO: 9109 - RNA, 12 nt, Artificial Sequence
  Synthetic
ucggcggauggu

SEQ ID NO: 9110 - RNA, 12 nt, Artificial Sequence
  Synthetic
uucggcggaugg

SEQ ID NO: 9111 - RNA, 12 nt, Artificial Sequence
  Synthetic
auucggcggaug

SEQ ID NO: 9112 - RNA, 12 nt, Artificial Sequence
  Synthetic
gauucggcggau

SEQ ID NO: 9113 - RNA, 12 nt, Artificial Sequence
  Synthetic
cgauucggcgga

SEQ ID NO: 9114 - RNA, 12 nt, Artificial Sequence
  Synthetic
ccgauucggcgg

SEQ ID NO: 9115 - RNA, 12 nt, Artificial Sequence
  Synthetic
gccgauucggcg

SEQ ID NO: 9116 - RNA, 12 nt, Artificial Sequence
  Synthetic
ggccgauucggc

SEQ ID NO: 9117 - RNA, 12 nt, Artificial Sequence
  Synthetic
aggccgauucgg

SEQ ID NO: 9118 - RNA, 12 nt, Artificial Sequence
  Synthetic
gaggccgauucg

SEQ ID NO: 9119 - RNA, 12 nt, Artificial Sequence
  Synthetic
agaggccgauuc

SEQ ID NO: 9120 - RNA, 12 nt, Artificial Sequence
  Synthetic
aagaggccgauu

SEQ ID NO: 9121 - RNA, 12 nt, Artificial Sequence
  Synthetic
gaagaggccgau

SEQ ID NO: 9122 - RNA, 12 nt, Artificial Sequence
  Synthetic
ugaagaggccga

SEQ ID NO: 9123 - RNA, 12 nt, Artificial Sequence
  Synthetic
uugaagaggccg

SEQ ID NO: 9124 - RNA, 12 nt, Artificial Sequence
  Synthetic
auugaagaggcc

SEQ ID NO: 9125 - RNA, 12 nt, Artificial Sequence
  Synthetic
uauugaagaggc

SEQ ID NO: 9126 - RNA, 12 nt, Artificial Sequence
  Synthetic
cuauugaagagg

SEQ ID NO: 9127 - RNA, 12 nt, Artificial Sequence
  Synthetic
gcuauugaagag

SEQ ID NO: 9128 - RNA, 12 nt, Artificial Sequence
  Synthetic
ugcuauugaaga

SEQ ID NO: 9129 - RNA, 12 nt, Artificial Sequence
  Synthetic
cugcuauugaag

SEQ ID NO: 9130 - RNA, 12 nt, Artificial Sequence
  Synthetic
acugcuauugaa

SEQ ID NO: 9131 - RNA, 12 nt, Artificial Sequence
  Synthetic
cacugcuauuga

SEQ ID NO: 9132 - RNA, 12 nt, Artificial Sequence
  Synthetic
gcacugcuauug

SEQ ID NO: 9133 - RNA, 12 nt, Artificial Sequence
  Synthetic
ggcacugcuauu

SEQ ID NO: 9134 - RNA, 12 nt, Artificial Sequence
  Synthetic
cggcacugcuau

SEQ ID NO: 9135 - RNA, 12 nt, Artificial Sequence
  Synthetic
ucggcacugcua

SEQ ID NO: 9136 - RNA, 12 nt, Artificial Sequence
  Synthetic
gucggcacugcu

SEQ ID NO: 9137 - RNA, 12 nt, Artificial Sequence
  Synthetic
ugucggcacugc

SEQ ID NO: 9138 - RNA, 12 nt, Artificial Sequence
  Synthetic
cugucggcacug

SEQ ID NO: 9139 - RNA, 12 nt, Artificial Sequence
  Synthetic
ccugucggcacu

SEQ ID NO: 9140 - RNA, 12 nt, Artificial Sequence
  Synthetic
cccugucggcac

SEQ ID NO: 9141 - RNA, 12 nt, Artificial Sequence
  Synthetic
acccugucggca

SEQ ID NO: 9142 - RNA, 12 nt, Artificial Sequence
  Synthetic
cacccugucggc

SEQ ID NO: 9143 - RNA, 12 nt, Artificial Sequence
  Synthetic
ucacccugucgg

SEQ ID NO: 9144 - RNA, 12 nt, Artificial Sequence
  Synthetic
uucacccugucg

SEQ ID NO: 9145 - RNA, 12 nt, Artificial Sequence
  Synthetic
cuucacccuguc

SEQ ID NO: 9146 - RNA, 12 nt, Artificial Sequence
  Synthetic
ccuucacccugu

SEQ ID NO: 9147 - RNA, 12 nt, Artificial Sequence
  Synthetic
accuucacccug

SEQ ID NO: 9148 - RNA, 12 nt, Artificial Sequence
  Synthetic
caccuucacccu

SEQ ID NO: 9149 - RNA, 12 nt, Artificial Sequence
  Synthetic
ucaccuucaccc

SEQ ID NO: 9150 - RNA, 12 nt, Artificial Sequence
  Synthetic
aucaccuucacc

SEQ ID NO: 9151 - RNA, 12 nt, Artificial Sequence
  Synthetic
aaucaccuucac

SEQ ID NO: 9152 - RNA, 12 nt, Artificial Sequence
  Synthetic
aaaucaccuuca

SEQ ID NO: 9153 - RNA, 12 nt, Artificial Sequence
  Synthetic
aaaaucaccuuc

SEQ ID NO: 9154 - RNA, 12 nt, Artificial Sequence
  Synthetic
gaaaaucaccuu

SEQ ID NO: 9155 - RNA, 12 nt, Artificial Sequence
  Synthetic
ggaaaaucaccu

SEQ ID NO: 9156 - RNA, 12 nt, Artificial Sequence
  Synthetic
uggaaaaucacc

SEQ ID NO: 9157 - RNA, 12 nt, Artificial Sequence
  Synthetic
guggaaaaucac

SEQ ID NO: 9158 - RNA, 12 nt, Artificial Sequence
  Synthetic
gguggaaaauca

SEQ ID NO: 9159 - RNA, 12 nt, Artificial Sequence
  Synthetic
ggguggaaaauc

SEQ ID NO: 9160 - RNA, 12 nt, Artificial Sequence
  Synthetic
cggguggaaaau

SEQ ID NO: 9161 - RNA, 12 nt, Artificial Sequence
  Synthetic
ccggguggaaaa

SEQ ID NO: 9162 - RNA, 12 nt, Artificial Sequence
  Synthetic
uccggguggaaa

SEQ ID NO: 9163 - RNA, 12 nt, Artificial Sequence
  Synthetic
cuccggguggaa

SEQ ID NO: 9164 - RNA, 12 nt, Artificial Sequence
  Synthetic
acuccgggugga

SEQ ID NO: 9165 - RNA, 12 nt, Artificial Sequence
  Synthetic
aacuccgggugg

SEQ ID NO: 9166 - RNA, 12 nt, Artificial Sequence
  Synthetic
gaacuccgggug

SEQ ID NO: 9167 - RNA, 12 nt, Artificial Sequence
  Synthetic
ggaacuccgggu

SEQ ID NO: 9168 - RNA, 12 nt, Artificial Sequence
  Synthetic
aggaacuccggg

SEQ ID NO: 9169 - RNA, 12 nt, Artificial Sequence
  Synthetic
gaggaacuccgg

SEQ ID NO: 9170 - RNA, 12 nt, Artificial Sequence
  Synthetic
agaggaacuccg

SEQ ID NO: 9171 - RNA, 12 nt, Artificial Sequence
  Synthetic
gagaggaacucc

SEQ ID NO: 9172 - RNA, 12 nt, Artificial Sequence
  Synthetic
ggagaggaacuc

SEQ ID NO: 9173 - RNA, 12 nt, Artificial Sequence
  Synthetic
aggagaggaacu

SEQ ID NO: 9174 - RNA, 12 nt, Artificial Sequence
  Synthetic
gaggagaggaac

SEQ ID NO: 9175 - RNA, 12 nt, Artificial Sequence
  Synthetic
ggaggagaggaa

SEQ ID NO: 9176 - RNA, 12 nt, Artificial Sequence
  Synthetic
uggaggagagga

SEQ ID NO: 9177 - RNA, 12 nt, Artificial Sequence
  Synthetic
guggaggagagg

SEQ ID NO: 9178 - RNA, 12 nt, Artificial Sequence
  Synthetic
uguggaggagag

SEQ ID NO: 9179 - RNA, 12 nt, Artificial Sequence
  Synthetic
uuguggaggaga

SEQ ID NO: 9180 - RNA, 12 nt, Artificial Sequence
  Synthetic
cuuguggaggag

SEQ ID NO: 9181 - RNA, 12 nt, Artificial Sequence
  Synthetic
gcuuguggagga

SEQ ID NO: 9182 - RNA, 12 nt, Artificial Sequence
  Synthetic
ggcuuguggagg

SEQ ID NO: 9183 - RNA, 12 nt, Artificial Sequence
  Synthetic
gggcuuguggag

SEQ ID NO: 9184 - RNA, 12 nt, Artificial Sequence
  Synthetic
ggggcuugugga

SEQ ID NO: 9185 - RNA, 12 nt, Artificial Sequence
  Synthetic
gggggcuugugg

SEQ ID NO: 9186 - RNA, 12 nt, Artificial Sequence
  Synthetic
agggggcuugug

SEQ ID NO: 9187 - RNA, 12 nt, Artificial Sequence
  Synthetic
cagggggcuugu

SEQ ID NO: 9188 - RNA, 12 nt, Artificial Sequence
  Synthetic
gcagggggcuug

SEQ ID NO: 9189 - RNA, 12 nt, Artificial Sequence
  Synthetic
agcagggggcuu

SEQ ID NO: 9190 - RNA, 12 nt, Artificial Sequence
  Synthetic
gagcagggggcu

SEQ ID NO: 9191 - RNA, 12 nt, Artificial Sequence
  Synthetic
ggagcagggggc

SEQ ID NO: 9192 - RNA, 12 nt, Artificial Sequence
  Synthetic
gggagcaggggg

SEQ ID NO: 9193 - RNA, 12 nt, Artificial Sequence
  Synthetic
agggagcagggg

SEQ ID NO: 9194 - RNA, 12 nt, Artificial Sequence
  Synthetic
cagggagcaggg

SEQ ID NO: 9195 - RNA, 12 nt, Artificial Sequence
  Synthetic
acagggagcagg

SEQ ID NO: 9196 - RNA, 12 nt, Artificial Sequence
  Synthetic
cacagggagcag

SEQ ID NO: 9197 - RNA, 12 nt, Artificial Sequence
  Synthetic
ccacagggagca

SEQ ID NO: 9198 - RNA, 12 nt, Artificial Sequence
  Synthetic
uccacagggagc

SEQ ID NO: 9199 - RNA, 12 nt, Artificial Sequence
  Synthetic
guccacagggag

SEQ ID NO: 9200 - RNA, 12 nt, Artificial Sequence
  Synthetic
aguccacaggga

SEQ ID NO: 9201 - RNA, 12 nt, Artificial Sequence
  Synthetic
uaguccacaggg

SEQ ID NO: 9202 - RNA, 12 nt, Artificial Sequence
  Synthetic
auaguccacagg

SEQ ID NO: 9203 - RNA, 12 nt, Artificial Sequence
  Synthetic
cauaguccacag

SEQ ID NO: 9204 - RNA, 12 nt, Artificial Sequence
  Synthetic
ucauaguccaca

SEQ ID NO: 9205 - RNA, 12 nt, Artificial Sequence
  Synthetic
cucauaguccac

SEQ ID NO: 9206 - RNA, 12 nt, Artificial Sequence
  Synthetic
ccucauagucca

SEQ ID NO: 9207 - RNA, 12 nt, Artificial Sequence
  Synthetic
uccucauagucc

SEQ ID NO: 9208 - RNA, 12 nt, Artificial Sequence
  Synthetic
cuccucauaguc

SEQ ID NO: 9209 - RNA, 12 nt, Artificial Sequence
  Synthetic
acuccucauagu

SEQ ID NO: 9210 - RNA, 12 nt, Artificial Sequence
  Synthetic
aacuccucauag

SEQ ID NO: 9211 - RNA, 12 nt, Artificial Sequence
  Synthetic
aaacuccucaua

SEQ ID NO: 9212 - RNA, 12 nt, Artificial Sequence
  Synthetic
caaacuccucau

SEQ ID NO: 9213 - RNA, 12 nt, Artificial Sequence
  Synthetic
acaaacuccuca

SEQ ID NO: 9214 - RNA, 12 nt, Artificial Sequence
  Synthetic
gacaaacuccuc

SEQ ID NO: 9215 - RNA, 12 nt, Artificial Sequence
  Synthetic
ggacaaacuccu

SEQ ID NO: 9216 - RNA, 12 nt, Artificial Sequence
  Synthetic
cggacaaacucc

SEQ ID NO: 9217 - RNA, 12 nt, Artificial Sequence
  Synthetic
acggacaaacuc

SEQ ID NO: 9218 - RNA, 12 nt, Artificial Sequence
  Synthetic
cacggacaaacu

SEQ ID NO: 9219 - RNA, 12 nt, Artificial Sequence
  Synthetic
ccacggacaaac

SEQ ID NO: 9220 - RNA, 12 nt, Artificial Sequence
  Synthetic
gccacggacaaa

SEQ ID NO: 9221 - RNA, 12 nt, Artificial Sequence
  Synthetic
agccacggacaa

SEQ ID NO: 9222 - RNA, 12 nt, Artificial Sequence
  Synthetic
cagccacggaca

SEQ ID NO: 9223 - RNA, 12 nt, Artificial Sequence
  Synthetic
acagccacggac

SEQ ID NO: 9224 - RNA, 12 nt, Artificial Sequence
  Synthetic
gacagccacgga

SEQ ID NO: 9225 - RNA, 12 nt, Artificial Sequence
  Synthetic
ugacagccacgg

SEQ ID NO: 9226 - RNA, 12 nt, Artificial Sequence
  Synthetic
gugacagccacg

SEQ ID NO: 9227 - RNA, 12 nt, Artificial Sequence
  Synthetic
ggugacagccac

SEQ ID NO: 9228 - RNA, 12 nt, Artificial Sequence
  Synthetic
aggugacagcca

SEQ ID NO: 9229 - RNA, 12 nt, Artificial Sequence
  Synthetic
aaggugacagcc

SEQ ID NO: 9230 - RNA, 12 nt, Artificial Sequence
  Synthetic
caaggugacagc

SEQ ID NO: 9231 - RNA, 12 nt, Artificial Sequence
  Synthetic
ccaaggugacag

SEQ ID NO: 9232 - RNA, 12 nt, Artificial Sequence
  Synthetic
uccaaggugaca

SEQ ID NO: 9233 - RNA, 12 nt, Artificial Sequence
  Synthetic
cuccaaggugac

SEQ ID NO: 9234 - RNA, 12 nt, Artificial Sequence
  Synthetic
acuccaagguga

SEQ ID NO: 9235 - RNA, 12 nt, Artificial Sequence
  Synthetic
gacuccaaggug

SEQ ID NO: 9236 - RNA, 12 nt, Artificial Sequence
  Synthetic
agacuccaaggu

SEQ ID NO: 9237 - RNA, 12 nt, Artificial Sequence
  Synthetic
aagacuccaagg

SEQ ID NO: 9238 - RNA, 12 nt, Artificial Sequence
  Synthetic
gaagacuccaag

SEQ ID NO: 9239 - RNA, 12 nt, Artificial Sequence
  Synthetic
ggaagacuccaa

SEQ ID NO: 9240 - RNA, 12 nt, Artificial Sequence
  Synthetic
gggaagacucca

SEQ ID NO: 9241 - RNA, 12 nt, Artificial Sequence
  Synthetic
ggggaagacucc

SEQ ID NO: 9242 - RNA, 12 nt, Artificial Sequence
  Synthetic
aggggaagacuc

SEQ ID NO: 9243 - RNA, 12 nt, Artificial Sequence
  Synthetic
gaggggaagacu

SEQ ID NO: 9244 - RNA, 12 nt, Artificial Sequence
  Synthetic
ggaggggaagac

SEQ ID NO: 9245 - RNA, 12 nt, Artificial Sequence
  Synthetic
aggaggggaaga

SEQ ID NO: 9246 - RNA, 12 nt, Artificial Sequence
  Synthetic
uaggaggggaag

SEQ ID NO: 9247 - RNA, 12 nt, Artificial Sequence
  Synthetic
guaggaggggaa

SEQ ID NO: 9248 - RNA, 12 nt, Artificial Sequence
  Synthetic
aguaggagggga

SEQ ID NO: 9249 - RNA, 12 nt, Artificial Sequence
  Synthetic
uaguaggagggg

SEQ ID NO: 9250 - RNA, 12 nt, Artificial Sequence
  Synthetic
auaguaggaggg

SEQ ID NO: 9251 - RNA, 12 nt, Artificial Sequence
  Synthetic
cauaguaggagg

SEQ ID NO: 9252 - RNA, 12 nt, Artificial Sequence
  Synthetic
ucauaguaggag

SEQ ID NO: 9253 - RNA, 12 nt, Artificial Sequence
  Synthetic
cucauaguagga

SEQ ID NO: 9254 - RNA, 12 nt, Artificial Sequence
  Synthetic
gcucauaguagg

SEQ ID NO: 9255 - RNA, 12 nt, Artificial Sequence
  Synthetic
ggcucauaguag

SEQ ID NO: 9256 - RNA, 12 nt, Artificial Sequence
  Synthetic
aggcucauagua

SEQ ID NO: 9257 - RNA, 12 nt, Artificial Sequence
  Synthetic
aaggcucauagu

SEQ ID NO: 9258 - RNA, 12 nt, Artificial Sequence
  Synthetic
caaggcucauag

SEQ ID NO: 9259 - RNA, 12 nt, Artificial Sequence
  Synthetic
ccaaggcucaua

SEQ ID NO: 9260 - RNA, 12 nt, Artificial Sequence
  Synthetic
cccaaggcucau

SEQ ID NO: 9261 - RNA, 12 nt, Artificial Sequence
  Synthetic
ccccaaggcuca

SEQ ID NO: 9262 - RNA, 12 nt, Artificial Sequence
  Synthetic
gccccaaggcuc

SEQ ID NO: 9263 - RNA, 12 nt, Artificial Sequence
  Synthetic
agccccaaggcu

SEQ ID NO: 9264 - RNA, 12 nt, Artificial Sequence
  Synthetic
uagccccaaggc

SEQ ID NO: 9265 - RNA, 12 nt, Artificial Sequence
  Synthetic
guagccccaagg

SEQ ID NO: 9266 - RNA, 12 nt, Artificial Sequence
  Synthetic
uguagccccaag

SEQ ID NO: 9267 - RNA, 12 nt, Artificial Sequence
  Synthetic
guguagccccaa

SEQ ID NO: 9268 - RNA, 12 nt, Artificial Sequence
  Synthetic
uguguagcccca

SEQ ID NO: 9269 - RNA, 12 nt, Artificial Sequence
  Synthetic
guguguagcccc

SEQ ID NO: 9270 - RNA, 12 nt, Artificial Sequence
  Synthetic
gguguguagccc

SEQ ID NO: 9271 - RNA, 12 nt, Artificial Sequence
  Synthetic
cgguguguagcc

SEQ ID NO: 9272 - RNA, 12 nt, Artificial Sequence
  Synthetic
ccgguguguagc

SEQ ID NO: 9273 - RNA, 12 nt, Artificial Sequence
  Synthetic
gccgguguguag

SEQ ID NO: 9274 - RNA, 12 nt, Artificial Sequence
  Synthetic
agccggugugua

SEQ ID NO: 9275 - RNA, 12 nt, Artificial Sequence
  Synthetic
cagccggugugu

SEQ ID NO: 9276 - RNA, 12 nt, Artificial Sequence
  Synthetic
ucagccggugug

SEQ ID NO: 9277 - RNA, 12 nt, Artificial Sequence
  Synthetic
cucagccggugu

SEQ ID NO: 9278 - RNA, 12 nt, Artificial Sequence
  Synthetic
acucagccggug

SEQ ID NO: 9279 - RNA, 12 nt, Artificial Sequence
  Synthetic
cacucagccggu

SEQ ID NO: 9280 - RNA, 12 nt, Artificial Sequence
  Synthetic
gcacucagccgg

SEQ ID NO: 9281 - RNA, 12 nt, Artificial Sequence
  Synthetic
ugcacucagccg

SEQ ID NO: 9282 - RNA, 12 nt, Artificial Sequence
  Synthetic
gugcacucagcc

SEQ ID NO: 9283 - RNA, 12 nt, Artificial Sequence
  Synthetic
cgugcacucagc

SEQ ID NO: 9284 - RNA, 12 nt, Artificial Sequence
  Synthetic
ccgugcacucag

SEQ ID NO: 9285 - RNA, 12 nt, Artificial Sequence
  Synthetic
accgugcacuca

SEQ ID NO: 9286 - RNA, 12 nt, Artificial Sequence
  Synthetic
aaccgugcacuc

SEQ ID NO: 9287 - RNA, 12 nt, Artificial Sequence
  Synthetic
uaaccgugcacu

SEQ ID NO: 9288 - RNA, 12 nt, Artificial Sequence
  Synthetic
auaaccgugcac

SEQ ID NO: 9289 - RNA, 12 nt, Artificial Sequence
  Synthetic
cauaaccgugca

SEQ ID NO: 9290 - RNA, 12 nt, Artificial Sequence
  Synthetic
ccauaaccgugc

SEQ ID NO: 9291 - RNA, 12 nt, Artificial Sequence
  Synthetic
cccauaaccgug

SEQ ID NO: 9292 - RNA, 12 nt, Artificial Sequence
  Synthetic
ucccauaaccgu

SEQ ID NO: 9293 - RNA, 12 nt, Artificial Sequence
  Synthetic
uucccauaaccg

SEQ ID NO: 9294 - RNA, 12 nt, Artificial Sequence
  Synthetic
auucccauaacc

SEQ ID NO: 9295 - RNA, 12 nt, Artificial Sequence
  Synthetic
gauucccauaac

SEQ ID NO: 9296 - RNA, 12 nt, Artificial Sequence
  Synthetic
ggauucccauaa

SEQ ID NO: 9297 - RNA, 12 nt, Artificial Sequence
  Synthetic
gggauucccaua

SEQ ID NO: 9298 - RNA, 12 nt, Artificial Sequence
  Synthetic
ggggauucccau

SEQ ID NO: 9299 - RNA, 12 nt, Artificial Sequence
  Synthetic
uggggauuccca

SEQ ID NO: 9300 - RNA, 12 nt, Artificial Sequence
  Synthetic
cuggggauuccc

SEQ ID NO: 9301 - RNA, 12 nt, Artificial Sequence
  Synthetic
acuggggauucc

SEQ ID NO: 9302 - RNA, 12 nt, Artificial Sequence
  Synthetic
uacuggggauuc

SEQ ID NO: 9303 - RNA, 12 nt, Artificial Sequence
  Synthetic
auacuggggauu

SEQ ID NO: 9304 - RNA, 12 nt, Artificial Sequence
  Synthetic
gauacuggggau

SEQ ID NO: 9305 - RNA, 12 nt, Artificial Sequence
  Synthetic
agauacugggga

SEQ ID NO: 9306 - RNA, 12 nt, Artificial Sequence
  Synthetic
gagauacugggg

SEQ ID NO: 9307 - RNA, 12 nt, Artificial Sequence
  Synthetic
ggagauacuggg

SEQ ID NO: 9308 - RNA, 12 nt, Artificial Sequence
  Synthetic
uggagauacugg

SEQ ID NO: 9309 - RNA, 12 nt, Artificial Sequence
  Synthetic
guggagauacug

SEQ ID NO: 9310 - RNA, 12 nt, Artificial Sequence
  Synthetic
gguggagauacu

SEQ ID NO: 9311 - RNA, 12 nt, Artificial Sequence
  Synthetic
ugguggagauac

SEQ ID NO: 9312 - RNA, 12 nt, Artificial Sequence
  Synthetic
uugguggagaua

SEQ ID NO: 9313 - RNA, 12 nt, Artificial Sequence
  Synthetic
auugguggagau

SEQ ID NO: 9314 - RNA, 12 nt, Artificial Sequence
  Synthetic
gauugguggaga

SEQ ID NO: 9315 - RNA, 12 nt, Artificial Sequence
  Synthetic
agauugguggag

SEQ ID NO: 9316 - RNA, 12 nt, Artificial Sequence
  Synthetic
gagauuggugga

SEQ ID NO: 9317 - RNA, 12 nt, Artificial Sequence
  Synthetic
agagauuggugg

SEQ ID NO: 9318 - RNA, 12 nt, Artificial Sequence
  Synthetic
gagagauuggug

SEQ ID NO: 9319 - RNA, 12 nt, Artificial Sequence
  Synthetic
ggagagauuggu

SEQ ID NO: 9320 - RNA, 12 nt, Artificial Sequence
  Synthetic
cggagagauugg

SEQ ID NO: 9321 - RNA, 12 nt, Artificial Sequence
  Synthetic
ccggagagauug

SEQ ID NO: 9322 - RNA, 12 nt, Artificial Sequence
  Synthetic
gccggagagauu

SEQ ID NO: 9323 - RNA, 12 nt, Artificial Sequence
  Synthetic
agccggagagau

SEQ ID NO: 9324 - RNA, 12 nt, Artificial Sequence
  Synthetic
aagccggagaga

SEQ ID NO: 9325 - RNA, 12 nt, Artificial Sequence
  Synthetic
gaagccggagag

SEQ ID NO: 9326 - RNA, 12 nt, Artificial Sequence
  Synthetic
cgaagccggaga

SEQ ID NO: 9327 - RNA, 12 nt, Artificial Sequence
  Synthetic
ccgaagccggag

SEQ ID NO: 9328 - RNA, 12 nt, Artificial Sequence
  Synthetic
gccgaagccgga

SEQ ID NO: 9329 - RNA, 12 nt, Artificial Sequence
  Synthetic
agccgaagccgg

SEQ ID NO: 9330 - RNA, 12 nt, Artificial Sequence
  Synthetic
cagccgaagccg

SEQ ID NO: 9331 - RNA, 12 nt, Artificial Sequence
  Synthetic
gcagccgaagcc

SEQ ID NO: 9332 - RNA, 12 nt, Artificial Sequence
  Synthetic
agcagccgaagc

SEQ ID NO: 9333 - RNA, 12 nt, Artificial Sequence
  Synthetic
aagcagccgaag

SEQ ID NO: 9334 - RNA, 12 nt, Artificial Sequence
  Synthetic
gaagcagccgaa

SEQ ID NO: 9335 - RNA, 12 nt, Artificial Sequence
  Synthetic
ugaagcagccga

SEQ ID NO: 9336 - RNA, 12 nt, Artificial Sequence
  Synthetic
augaagcagccg

SEQ ID NO: 9337 - RNA, 12 nt, Artificial Sequence
  Synthetic
caugaagcagcc

SEQ ID NO: 9338 - RNA, 12 nt, Artificial Sequence
  Synthetic
ccaugaagcagc

SEQ ID NO: 9339 - RNA, 12 nt, Artificial Sequence
  Synthetic
uccaugaagcag

SEQ ID NO: 9340 - RNA, 12 nt, Artificial Sequence
  Synthetic
cuccaugaagca

SEQ ID NO: 9341 - RNA, 12 nt, Artificial Sequence
  Synthetic
ccuccaugaagc

SEQ ID NO: 9342 - RNA, 12 nt, Artificial Sequence
  Synthetic
uccuccaugaag

SEQ ID NO: 9343 - RNA, 12 nt, Artificial Sequence
  Synthetic
uuccuccaugaa

SEQ ID NO: 9344 - RNA, 12 nt, Artificial Sequence
  Synthetic
guuccuccauga

SEQ ID NO: 9345 - RNA, 12 nt, Artificial Sequence
  Synthetic
uguuccuccaug

SEQ ID NO: 9346 - RNA, 12 nt, Artificial Sequence
  Synthetic
guguuccuccau

SEQ ID NO: 9347 - RNA, 12 nt, Artificial Sequence
  Synthetic
uguguuccucca

SEQ ID NO: 9348 - RNA, 12 nt, Artificial Sequence
  Synthetic
auguguuccucc

SEQ ID NO: 9349 - RNA, 12 nt, Artificial Sequence
  Synthetic
gauguguuccuc

SEQ ID NO: 9350 - RNA, 12 nt, Artificial Sequence
  Synthetic
cgauguguuccu

SEQ ID NO: 9351 - RNA, 12 nt, Artificial Sequence
  Synthetic
gcgauguguucc

SEQ ID NO: 9352 - RNA, 12 nt, Artificial Sequence
  Synthetic
ugcgauguguuc

SEQ ID NO: 9353 - RNA, 12 nt, Artificial Sequence
  Synthetic
cugcgauguguu

SEQ ID NO: 9354 - RNA, 12 nt, Artificial Sequence
  Synthetic
ucugcgaugugu

SEQ ID NO: 9355 - RNA, 12 nt, Artificial Sequence
  Synthetic
gucugcgaugug

SEQ ID NO: 9356 - RNA, 12 nt, Artificial Sequence
  Synthetic
ggucugcgaugu

SEQ ID NO: 9357 - RNA, 12 nt, Artificial Sequence
  Synthetic
gggucugcgaug

SEQ ID NO: 9358 - RNA, 12 nt, Artificial Sequence
  Synthetic
ggggucugcgau

SEQ ID NO: 9359 - RNA, 12 nt, Artificial Sequence
  Synthetic
aggggucugcga

SEQ ID NO: 9360 - RNA, 12 nt, Artificial Sequence
  Synthetic
gaggggucugcg

SEQ ID NO: 9361 - RNA, 12 nt, Artificial Sequence
  Synthetic
ugaggggucugc

SEQ ID NO: 9362 - RNA, 12 nt, Artificial Sequence
  Synthetic
cugaggggucug

SEQ ID NO: 9363 - RNA, 12 nt, Artificial Sequence
  Synthetic
gcugaggggucu

SEQ ID NO: 9364 - RNA, 12 nt, Artificial Sequence
  Synthetic
agcugagggguc

SEQ ID NO: 9365 - RNA, 12 nt, Artificial Sequence
  Synthetic
aagcugaggggu

SEQ ID NO: 9366 - RNA, 12 nt, Artificial Sequence
  Synthetic
uaagcugagggg

SEQ ID NO: 9367 - RNA, 12 nt, Artificial Sequence
  Synthetic
guaagcugaggg

SEQ ID NO: 9368 - RNA, 12 nt, Artificial Sequence
  Synthetic
cguaagcugagg

SEQ ID NO: 9369 - RNA, 12 nt, Artificial Sequence
  Synthetic
ccguaagcugag

SEQ ID NO: 9370 - RNA, 12 nt, Artificial Sequence
  Synthetic
accguaagcuga

SEQ ID NO: 9371 - RNA, 12 nt, Artificial Sequence
  Synthetic
uaccguaagcug

SEQ ID NO: 9372 - RNA, 12 nt, Artificial Sequence
  Synthetic
auaccguaagcu

SEQ ID NO: 9373 - RNA, 12 nt, Artificial Sequence
  Synthetic
gauaccguaagc

SEQ ID NO: 9374 - RNA, 12 nt, Artificial Sequence
  Synthetic
agauaccguaag

SEQ ID NO: 9375 - RNA, 12 nt, Artificial Sequence
  Synthetic
uagauaccguaa

SEQ ID NO: 9376 - RNA, 12 nt, Artificial Sequence
  Synthetic
guagauaccgua

SEQ ID NO: 9377 - RNA, 12 nt, Artificial Sequence
  Synthetic
uguagauaccgu

SEQ ID NO: 9378 - RNA, 12 nt, Artificial Sequence
  Synthetic
auguagauaccg

SEQ ID NO: 9379 - RNA, 12 nt, Artificial Sequence
  Synthetic
aauguagauacc

SEQ ID NO: 9380 - RNA, 12 nt, Artificial Sequence
  Synthetic
gaauguagauac

SEQ ID NO: 9381 - RNA, 12 nt, Artificial Sequence
  Synthetic
agaauguagaua

SEQ ID NO: 9382 - RNA, 12 nt, Artificial Sequence
  Synthetic
aagaauguagau

SEQ ID NO: 9383 - RNA, 12 nt, Artificial Sequence
  Synthetic
caagaauguaga

SEQ ID NO: 9384 - RNA, 12 nt, Artificial Sequence
  Synthetic
ucaagaauguag

SEQ ID NO: 9385 - RNA, 12 nt, Artificial Sequence
  Synthetic
gucaagaaugua

SEQ ID NO: 9386 - RNA, 12 nt, Artificial Sequence
  Synthetic
ggucaagaaugu

SEQ ID NO: 9387 - RNA, 12 nt, Artificial Sequence
  Synthetic
cggucaagaaug

SEQ ID NO: 9388 - RNA, 12 nt, Artificial Sequence
  Synthetic
ccggucaagaau

SEQ ID NO: 9389 - RNA, 12 nt, Artificial Sequence
  Synthetic
gccggucaagaa

SEQ ID NO: 9390 - RNA, 12 nt, Artificial Sequence
  Synthetic
cgccggucaaga

SEQ ID NO: 9391 - RNA, 12 nt, Artificial Sequence
  Synthetic
ccgccggucaag

SEQ ID NO: 9392 - RNA, 12 nt, Artificial Sequence
  Synthetic
accgccggucaa

SEQ ID NO: 9393 - RNA, 12 nt, Artificial Sequence
  Synthetic
aaccgccgguca

SEQ ID NO: 9394 - RNA, 12 nt, Artificial Sequence
  Synthetic
gaaccgccgguc

SEQ ID NO: 9395 - RNA, 12 nt, Artificial Sequence
  Synthetic
ggaaccgccggu

SEQ ID NO: 9396 - RNA, 12 nt, Artificial Sequence
  Synthetic
cggaaccgccgg

SEQ ID NO: 9397 - RNA, 12 nt, Artificial Sequence
  Synthetic
gcggaaccgccg

SEQ ID NO: 9398 - RNA, 12 nt, Artificial Sequence
  Synthetic
ugcggaaccgcc

SEQ ID NO: 9399 - RNA, 12 nt, Artificial Sequence
  Synthetic
cugcggaaccgc

SEQ ID NO: 9400 - RNA, 12 nt, Artificial Sequence
  Synthetic
gcugcggaaccg

SEQ ID NO: 9401 - RNA, 12 nt, Artificial Sequence
  Synthetic
ggcugcggaacc

SEQ ID NO: 9402 - RNA, 12 nt, Artificial Sequence
  Synthetic
aggcugcggaac

SEQ ID NO: 9403 - RNA, 12 nt, Artificial Sequence
  Synthetic
caggcugcggaa

SEQ ID NO: 9404 - RNA, 12 nt, Artificial Sequence
  Synthetic
ccaggcugcgga

SEQ ID NO: 9405 - RNA, 12 nt, Artificial Sequence
  Synthetic
uccaggcugcgg

SEQ ID NO: 9406 - RNA, 12 nt, Artificial Sequence
  Synthetic
auccaggcugcg

SEQ ID NO: 9407 - RNA, 12 nt, Artificial Sequence
  Synthetic
cauccaggcugc

SEQ ID NO: 9408 - RNA, 12 nt, Artificial Sequence
  Synthetic
ucauccaggcug

SEQ ID NO: 9409 - RNA, 12 nt, Artificial Sequence
  Synthetic
aucauccaggcu

SEQ ID NO: 9410 - RNA, 12 nt, Artificial Sequence
  Synthetic
aaucauccaggc

SEQ ID NO: 9411 - RNA, 12 nt, Artificial Sequence
  Synthetic
gaaucauccagg

SEQ ID NO: 9412 - RNA, 12 nt, Artificial Sequence
  Synthetic
ggaaucauccag

SEQ ID NO: 9413 - RNA, 12 nt, Artificial Sequence
  Synthetic
aggaaucaucca

SEQ ID NO: 9414 - RNA, 12 nt, Artificial Sequence
  Synthetic
caggaaucaucc

SEQ ID NO: 9415 - RNA, 12 nt, Artificial Sequence
  Synthetic
gcaggaaucauc

SEQ ID NO: 9416 - RNA, 12 nt, Artificial Sequence
  Synthetic
agcaggaaucau

SEQ ID NO: 9417 - RNA, 12 nt, Artificial Sequence
  Synthetic
gagcaggaauca

SEQ ID NO: 9418 - RNA, 12 nt, Artificial Sequence
  Synthetic
cgagcaggaauc

SEQ ID NO: 9419 - RNA, 12 nt, Artificial Sequence
  Synthetic
gcgagcaggaau

SEQ ID NO: 9420 - RNA, 12 nt, Artificial Sequence
  Synthetic
ugcgagcaggaa

SEQ ID NO: 9421 - RNA, 12 nt, Artificial Sequence
  Synthetic
cugcgagcagga

SEQ ID NO: 9422 - RNA, 12 nt, Artificial Sequence
  Synthetic
gcugcgagcagg

SEQ ID NO: 9423 - RNA, 12 nt, Artificial Sequence
  Synthetic
agcugcgagcag

SEQ ID NO: 9424 - RNA, 12 nt, Artificial Sequence
  Synthetic
gagcugcgagca

SEQ ID NO: 9425 - RNA, 12 nt, Artificial Sequence
  Synthetic
ugagcugcgagc

SEQ ID NO: 9426 - RNA, 12 nt, Artificial Sequence
  Synthetic
gugagcugcgag

SEQ ID NO: 9427 - RNA, 12 nt, Artificial Sequence
  Synthetic
ggugagcugcga

SEQ ID NO: 9428 - RNA, 12 nt, Artificial Sequence
  Synthetic
aggugagcugcg

SEQ ID NO: 9429 - RNA, 12 nt, Artificial Sequence
  Synthetic
gaggugagcugc

SEQ ID NO: 9430 - RNA, 12 nt, Artificial Sequence
  Synthetic
ggaggugagcug

SEQ ID NO: 9431 - RNA, 12 nt, Artificial Sequence
  Synthetic
aggaggugagcu

SEQ ID NO: 9432 - RNA, 12 nt, Artificial Sequence
  Synthetic
aaggaggugagc

SEQ ID NO: 9433 - RNA, 12 nt, Artificial Sequence
  Synthetic
gaaggaggugag

SEQ ID NO: 9434 - RNA, 12 nt, Artificial Sequence
  Synthetic
ggaaggagguga

SEQ ID NO: 9435 - RNA, 12 nt, Artificial Sequence
  Synthetic
aggaaggaggug

SEQ ID NO: 9436 - RNA, 12 nt, Artificial Sequence
  Synthetic
gaggaaggaggu

SEQ ID NO: 9437 - RNA, 12 nt, Artificial Sequence
  Synthetic
agaggaaggagg

SEQ ID NO: 9438 - RNA, 12 nt, Artificial Sequence
  Synthetic
uagaggaaggag

SEQ ID NO: 9439 - RNA, 12 nt, Artificial Sequence
  Synthetic
guagaggaagga

SEQ ID NO: 9440 - RNA, 12 nt, Artificial Sequence
  Synthetic
uguagaggaagg

SEQ ID NO: 9441 - RNA, 12 nt, Artificial Sequence
  Synthetic
cuguagaggaag

SEQ ID NO: 9442 - RNA, 12 nt, Artificial Sequence
  Synthetic
acuguagaggaa

SEQ ID NO: 9443 - RNA, 12 nt, Artificial Sequence
  Synthetic
aacuguagagga

SEQ ID NO: 9444 - RNA, 12 nt, Artificial Sequence
  Synthetic
aaacuguagagg

SEQ ID NO: 9445 - RNA, 12 nt, Artificial Sequence
  Synthetic
gaaacuguagag

SEQ ID NO: 9446 - RNA, 12 nt, Artificial Sequence
  Synthetic
agaaacuguaga

SEQ ID NO: 9447 - RNA, 12 nt, Artificial Sequence
  Synthetic
cagaaacuguag

SEQ ID NO: 9448 - RNA, 12 nt, Artificial Sequence
  Synthetic
acagaaacugua

SEQ ID NO: 9449 - RNA, 12 nt, Artificial Sequence
  Synthetic
gacagaaacugu

SEQ ID NO: 9450 - RNA, 12 nt, Artificial Sequence
  Synthetic
ugacagaaacug

SEQ ID NO: 9451 - RNA, 12 nt, Artificial Sequence
  Synthetic
cugacagaaacu

SEQ ID NO: 9452 - RNA, 12 nt, Artificial Sequence
  Synthetic
gcugacagaaac

SEQ ID NO: 9453 - RNA, 12 nt, Artificial Sequence
  Synthetic
ugcugacagaaa

SEQ ID NO: 9454 - RNA, 12 nt, Artificial Sequence
  Synthetic
cugcugacagaa

SEQ ID NO: 9455 - RNA, 12 nt, Artificial Sequence
  Synthetic
ucugcugacaga

SEQ ID NO: 9456 - RNA, 12 nt, Artificial Sequence
  Synthetic
cucugcugacag

SEQ ID NO: 9457 - RNA, 12 nt, Artificial Sequence
  Synthetic
gcucugcugaca

SEQ ID NO: 9458 - RNA, 12 nt, Artificial Sequence
  Synthetic
ggcucugcugac

SEQ ID NO: 9459 - RNA, 12 nt, Artificial Sequence
  Synthetic
cggcucugcuga

SEQ ID NO: 9460 - RNA, 12 nt, Artificial Sequence
  Synthetic
ccggcucugcug

SEQ ID NO: 9461 - RNA, 12 nt, Artificial Sequence
  Synthetic
gccggcucugcu

SEQ ID NO: 9462 - RNA, 12 nt, Artificial Sequence
  Synthetic
cgccggcucugc

SEQ ID NO: 9463 - RNA, 12 nt, Artificial Sequence
  Synthetic
ccgccggcucug

SEQ ID NO: 9464 - RNA, 12 nt, Artificial Sequence
  Synthetic
gccgccggcucu

SEQ ID NO: 9465 - RNA, 12 nt, Artificial Sequence
  Synthetic
ugccgccggcuc

SEQ ID NO: 9466 - RNA, 12 nt, Artificial Sequence
  Synthetic
cugccgccggcu

SEQ ID NO: 9467 - RNA, 12 nt, Artificial Sequence
  Synthetic
gcugccgccggc

SEQ ID NO: 9468 - RNA, 12 nt, Artificial Sequence
  Synthetic
cgcugccgccgg

SEQ ID NO: 9469 - RNA, 12 nt, Artificial Sequence
  Synthetic
acgcugccgccg

SEQ ID NO: 9470 - RNA, 12 nt, Artificial Sequence
  Synthetic
uacgcugccgcc

SEQ ID NO: 9471 - RNA, 12 nt, Artificial Sequence
  Synthetic
auacgcugccgc

SEQ ID NO: 9472 - RNA, 12 nt, Artificial Sequence
  Synthetic
gauacgcugccg

SEQ ID NO: 9473 - RNA, 12 nt, Artificial Sequence
  Synthetic
ugauacgcugcc

SEQ ID NO: 9474 - RNA, 12 nt, Artificial Sequence
  Synthetic
augauacgcugc

SEQ ID NO: 9475 - RNA, 12 nt, Artificial Sequence
  Synthetic
gaugauacgcug

SEQ ID NO: 9476 - RNA, 12 nt, Artificial Sequence
  Synthetic
ggaugauacgcu

SEQ ID NO: 9477 - RNA, 12 nt, Artificial Sequence
  Synthetic
uggaugauacgc

SEQ ID NO: 9478 - RNA, 12 nt, Artificial Sequence
  Synthetic
cuggaugauacg

SEQ ID NO: 9479 - RNA, 12 nt, Artificial Sequence
  Synthetic
gcuggaugauac

SEQ ID NO: 9480 - RNA, 12 nt, Artificial Sequence
  Synthetic
cgcuggaugaua

SEQ ID NO: 9481 - RNA, 12 nt, Artificial Sequence
  Synthetic
ccgcuggaugau

SEQ ID NO: 9482 - RNA, 12 nt, Artificial Sequence
  Synthetic
uccgcuggauga

SEQ ID NO: 9483 - RNA, 12 nt, Artificial Sequence
  Synthetic
uuccgcuggaug

SEQ ID NO: 9484 - RNA, 12 nt, Artificial Sequence
  Synthetic
guuccgcuggau

SEQ ID NO: 9485 - RNA, 12 nt, Artificial Sequence
  Synthetic
gguuccgcugga

SEQ ID NO: 9486 - RNA, 12 nt, Artificial Sequence
  Synthetic
cgguuccgcugg

SEQ ID NO: 9487 - RNA, 12 nt, Artificial Sequence
  Synthetic
gcgguuccgcug

SEQ ID NO: 9488 - RNA, 12 nt, Artificial Sequence
  Synthetic
ugcgguuccgcu

SEQ ID NO: 9489 - RNA, 12 nt, Artificial Sequence
  Synthetic
gugcgguuccgc

SEQ ID NO: 9490 - RNA, 12 nt, Artificial Sequence
  Synthetic
cgugcgguuccg

SEQ ID NO: 9491 - RNA, 12 nt, Artificial Sequence
  Synthetic
ccgugcgguucc

SEQ ID NO: 9492 - RNA, 12 nt, Artificial Sequence
  Synthetic
uccgugcgguuc

SEQ ID NO: 9493 - RNA, 12 nt, Artificial Sequence
  Synthetic
cuccgugcgguu

SEQ ID NO: 9494 - RNA, 12 nt, Artificial Sequence
  Synthetic
gcuccgugcggu

SEQ ID NO: 9495 - RNA, 12 nt, Artificial Sequence
  Synthetic
cgcuccgugcgg

SEQ ID NO: 9496 - RNA, 12 nt, Artificial Sequence
  Synthetic
gcgcuccgugcg

SEQ ID NO: 9497 - RNA, 12 nt, Artificial Sequence
  Synthetic
ggcgcuccgugc

SEQ ID NO: 9498 - RNA, 12 nt, Artificial Sequence
  Synthetic
aggcgcuccgug

SEQ ID NO: 9499 - RNA, 12 nt, Artificial Sequence
  Synthetic
gaggcgcuccgu

SEQ ID NO: 9500 - RNA, 12 nt, Artificial Sequence
  Synthetic
agaggcgcuccg

SEQ ID NO: 9501 - RNA, 12 nt, Artificial Sequence
  Synthetic
gagaggcgcucc

SEQ ID NO: 9502 - RNA, 12 nt, Artificial Sequence
  Synthetic
ggagaggcgcuc

SEQ ID NO: 9503 - RNA, 12 nt, Artificial Sequence
  Synthetic
cggagaggcgcu

SEQ ID NO: 9504 - RNA, 12 nt, Artificial Sequence
  Synthetic
ucggagaggcgc

SEQ ID NO: 9505 - RNA, 12 nt, Artificial Sequence
  Synthetic
gucggagaggcg

SEQ ID NO: 9506 - RNA, 12 nt, Artificial Sequence
  Synthetic
ggucggagaggc

SEQ ID NO: 9507 - RNA, 12 nt, Artificial Sequence
  Synthetic
aggucggagagg

SEQ ID NO: 9508 - RNA, 12 nt, Artificial Sequence
  Synthetic
aaggucggagag

SEQ ID NO: 9509 - RNA, 12 nt, Artificial Sequence
  Synthetic
gaaggucggaga

SEQ ID NO: 9510 - RNA, 12 nt, Artificial Sequence
  Synthetic
agaaggucggag

SEQ ID NO: 9511 - RNA, 12 nt, Artificial Sequence
  Synthetic
cagaaggucgga

SEQ ID NO: 9512 - RNA, 12 nt, Artificial Sequence
  Synthetic
ccagaaggucgg

SEQ ID NO: 9513 - RNA, 12 nt, Artificial Sequence
  Synthetic
uccagaaggucg

SEQ ID NO: 9514 - RNA, 12 nt, Artificial Sequence
  Synthetic
guccagaagguc

SEQ ID NO: 9515 - RNA, 12 nt, Artificial Sequence
  Synthetic
aguccagaaggu

SEQ ID NO: 9516 - RNA, 12 nt, Artificial Sequence
  Synthetic
caguccagaagg

SEQ ID NO: 9517 - RNA, 12 nt, Artificial Sequence
  Synthetic
ccaguccagaag

SEQ ID NO: 9518 - RNA, 12 nt, Artificial Sequence
  Synthetic
uccaguccagaa

SEQ ID NO: 9519 - RNA, 12 nt, Artificial Sequence
  Synthetic
uuccaguccaga

SEQ ID NO: 9520 - RNA, 12 nt, Artificial Sequence
  Synthetic
uuuccaguccag

SEQ ID NO: 9521 - RNA, 12 nt, Artificial Sequence
  Synthetic
auuuccagucca

SEQ ID NO: 9522 - RNA, 12 nt, Artificial Sequence
  Synthetic
uauuuccagucc

SEQ ID NO: 9523 - RNA, 12 nt, Artificial Sequence
  Synthetic
guauuuccaguc

SEQ ID NO: 9524 - RNA, 12 nt, Artificial Sequence
  Synthetic
gguauuuccagu

SEQ ID NO: 9525 - RNA, 12 nt, Artificial Sequence
  Synthetic
agguauuuccag

SEQ ID NO: 9526 - RNA, 12 nt, Artificial Sequence
  Synthetic
uagguauuucca

SEQ ID NO: 9527 - RNA, 12 nt, Artificial Sequence
  Synthetic
cuagguauuucc

SEQ ID NO: 9528 - RNA, 12 nt, Artificial Sequence
  Synthetic
ccuagguauuuc

SEQ ID NO: 9529 - RNA, 12 nt, Artificial Sequence
  Synthetic
gccuagguauuu

SEQ ID NO: 9530 - RNA, 12 nt, Artificial Sequence
  Synthetic
ggccuagguauu

SEQ ID NO: 9531 - RNA, 12 nt, Artificial Sequence
  Synthetic
cggccuagguau

SEQ ID NO: 9532 - RNA, 12 nt, Artificial Sequence
  Synthetic
ccggccuaggua

SEQ ID NO: 9533 - RNA, 12 nt, Artificial Sequence
  Synthetic
accggccuaggu

SEQ ID NO: 9534 - RNA, 12 nt, Artificial Sequence
  Synthetic
uaccggccuagg

SEQ ID NO: 9535 - RNA, 12 nt, Artificial Sequence
  Synthetic
guaccggccuag

SEQ ID NO: 9536 - RNA, 12 nt, Artificial Sequence
  Synthetic
aguaccggccua

SEQ ID NO: 9537 - RNA, 12 nt, Artificial Sequence
  Synthetic
uaguaccggccu

SEQ ID NO: 9538 - RNA, 12 nt, Artificial Sequence
  Synthetic
auaguaccggcc

SEQ ID NO: 9539 - RNA, 12 nt, Artificial Sequence
  Synthetic
uauaguaccggc

SEQ ID NO: 9540 - RNA, 12 nt, Artificial Sequence
  Synthetic
auauaguaccgg

SEQ ID NO: 9541 - RNA, 12 nt, Artificial Sequence
  Synthetic
cauauaguaccg

SEQ ID NO: 9542 - RNA, 12 nt, Artificial Sequence
  Synthetic
acauauaguacc

SEQ ID NO: 9543 - RNA, 12 nt, Artificial Sequence
  Synthetic
gacauauaguac

SEQ ID NO: 9544 - RNA, 12 nt, Artificial Sequence
  Synthetic
agacauauagua

SEQ ID NO: 9545 - RNA, 12 nt, Artificial Sequence
  Synthetic
cagacauauagu

SEQ ID NO: 9546 - RNA, 12 nt, Artificial Sequence
  Synthetic
gcagacauauag

SEQ ID NO: 9547 - RNA, 12 nt, Artificial Sequence
  Synthetic
cgcagacauaua

SEQ ID NO: 9548 - RNA, 12 nt, Artificial Sequence
  Synthetic
gcgcagacauau

SEQ ID NO: 9549 - RNA, 12 nt, Artificial Sequence
  Synthetic
cgcgcagacaua

SEQ ID NO: 9550 - RNA, 12 nt, Artificial Sequence
  Synthetic
gcgcgcagacau

SEQ ID NO: 9551 - RNA, 12 nt, Artificial Sequence
  Synthetic
ggcgcgcagaca

SEQ ID NO: 9552 - RNA, 12 nt, Artificial Sequence
  Synthetic
uggcgcgcagac

SEQ ID NO: 9553 - RNA, 12 nt, Artificial Sequence
  Synthetic
guggcgcgcaga

SEQ ID NO: 9554 - RNA, 12 nt, Artificial Sequence
  Synthetic
uguggcgcgcag

SEQ ID NO: 9555 - RNA, 12 nt, Artificial Sequence
  Synthetic
auguggcgcgca

SEQ ID NO: 9556 - RNA, 12 nt, Artificial Sequence
  Synthetic
cauguggcgcgc

SEQ ID NO: 9557 - RNA, 12 nt, Artificial Sequence
  Synthetic
ccauguggcgcg

SEQ ID NO: 9558 - RNA, 12 nt, Artificial Sequence
  Synthetic
gccauguggcgc

SEQ ID NO: 9559 - RNA, 12 nt, Artificial Sequence
  Synthetic
cgccauguggcg

SEQ ID NO: 9560 - RNA, 12 nt, Artificial Sequence
  Synthetic
gcgccauguggc

SEQ ID NO: 9561 - RNA, 12 nt, Artificial Sequence
  Synthetic
agcgccaugugg

SEQ ID NO: 9562 - RNA, 12 nt, Artificial Sequence
  Synthetic
cagcgccaugug

SEQ ID NO: 9563 - RNA, 12 nt, Artificial Sequence
  Synthetic
acagcgccaugu

SEQ ID NO: 9564 - RNA, 12 nt, Artificial Sequence
  Synthetic
gacagcgccaug

SEQ ID NO: 9565 - RNA, 12 nt, Artificial Sequence
  Synthetic
ggacagcgccau

SEQ ID NO: 9566 - RNA, 12 nt, Artificial Sequence
  Synthetic
uggacagcgcca

SEQ ID NO: 9567 - RNA, 12 nt, Artificial Sequence
  Synthetic
uuggacagcgcc

SEQ ID NO: 9568 - RNA, 12 nt, Artificial Sequence
  Synthetic
cuuggacagcgc

SEQ ID NO: 9569 - RNA, 12 nt, Artificial Sequence
  Synthetic
ccuuggacagcg

SEQ ID NO: 9570 - RNA, 12 nt, Artificial Sequence
  Synthetic
gccuuggacagc

SEQ ID NO: 9571 - RNA, 12 nt, Artificial Sequence
  Synthetic
ggccuuggacag

SEQ ID NO: 9572 - RNA, 12 nt, Artificial Sequence
  Synthetic
aggccuuggaca

SEQ ID NO: 9573 - RNA, 12 nt, Artificial Sequence
  Synthetic
aaggccuuggac

SEQ ID NO: 9574 - RNA, 12 nt, Artificial Sequence
  Synthetic
aaaggccuugga

SEQ ID NO: 9575 - RNA, 12 nt, Artificial Sequence
  Synthetic
gaaaggccuugg

SEQ ID NO: 9576 - RNA, 12 nt, Artificial Sequence
  Synthetic
ggaaaggccuug

SEQ ID NO: 9577 - RNA, 12 nt, Artificial Sequence
  Synthetic
uggaaaggccuu

SEQ ID NO: 9578 - RNA, 12 nt, Artificial Sequence
  Synthetic
cuggaaaggccu

SEQ ID NO: 9579 - RNA, 12 nt, Artificial Sequence
  Synthetic
ucuggaaaggcc

SEQ ID NO: 9580 - RNA, 12 nt, Artificial Sequence
  Synthetic
cucuggaaaggc

SEQ ID NO: 9581 - RNA, 12 nt, Artificial Sequence
  Synthetic
gcucuggaaagg

SEQ ID NO: 9582 - RNA, 12 nt, Artificial Sequence
  Synthetic
ugcucuggaaag

SEQ ID NO: 9583 - RNA, 12 nt, Artificial Sequence
  Synthetic
gugcucuggaaa

SEQ ID NO: 9584 - RNA, 12 nt, Artificial Sequence
  Synthetic
agugcucuggaa

SEQ ID NO: 9585 - RNA, 12 nt, Artificial Sequence
  Synthetic
aagugcucugga

SEQ ID NO: 9586 - RNA, 12 nt, Artificial Sequence
  Synthetic
gaagugcucugg

SEQ ID NO: 9587 - RNA, 12 nt, Artificial Sequence
  Synthetic
ugaagugcucug

SEQ ID NO: 9588 - RNA, 12 nt, Artificial Sequence
  Synthetic
gugaagugcucu

SEQ ID NO: 9589 - RNA, 12 nt, Artificial Sequence
  Synthetic
ggugaagugcuc

SEQ ID NO: 9590 - RNA, 12 nt, Artificial Sequence
  Synthetic
aggugaagugcu

SEQ ID NO: 9591 - RNA, 12 nt, Artificial Sequence
  Synthetic
uaggugaagugc

SEQ ID NO: 9592 - RNA, 12 nt, Artificial Sequence
  Synthetic
guaggugaagug

SEQ ID NO: 9593 - RNA, 12 nt, Artificial Sequence
  Synthetic
cguaggugaagu

SEQ ID NO: 9594 - RNA, 12 nt, Artificial Sequence
  Synthetic
ucguaggugaag

SEQ ID NO: 9595 - RNA, 12 nt, Artificial Sequence
  Synthetic
cucguaggugaa

SEQ ID NO: 9596 - RNA, 12 nt, Artificial Sequence
  Synthetic
gcucguagguga

SEQ ID NO: 9597 - RNA, 12 nt, Artificial Sequence
  Synthetic
ggcucguaggug

SEQ ID NO: 9598 - RNA, 12 nt, Artificial Sequence
  Synthetic
gggcucguaggu

SEQ ID NO: 9599 - RNA, 12 nt, Artificial Sequence
  Synthetic
ugggcucguagg

SEQ ID NO: 9600 - RNA, 12 nt, Artificial Sequence
  Synthetic
uugggcucguag

SEQ ID NO: 9601 - RNA, 12 nt, Artificial Sequence
  Synthetic
guugggcucgua

SEQ ID NO: 9602 - RNA, 12 nt, Artificial Sequence
  Synthetic
cguugggcucgu

SEQ ID NO: 9603 - RNA, 12 nt, Artificial Sequence
  Synthetic
ucguugggcucg

SEQ ID NO: 9604 - RNA, 12 nt, Artificial Sequence
  Synthetic
cucguugggcuc

SEQ ID NO: 9605 - RNA, 12 nt, Artificial Sequence
  Synthetic
ccucguugggcu

SEQ ID NO: 9606 - RNA, 12 nt, Artificial Sequence
  Synthetic
gccucguugggc

SEQ ID NO: 9607 - RNA, 12 nt, Artificial Sequence
  Synthetic
cgccucguuggg

SEQ ID NO: 9608 - RNA, 12 nt, Artificial Sequence
  Synthetic
ccgccucguugg

SEQ ID NO: 9609 - RNA, 12 nt, Artificial Sequence
  Synthetic
uccgccucguug

SEQ ID NO: 9610 - RNA, 12 nt, Artificial Sequence
  Synthetic
auccgccucguu

SEQ ID NO: 9611 - RNA, 12 nt, Artificial Sequence
  Synthetic
cauccgccucgu

SEQ ID NO: 9612 - RNA, 12 nt, Artificial Sequence
  Synthetic
gcauccgccucg

SEQ ID NO: 9613 - RNA, 12 nt, Artificial Sequence
  Synthetic
cgcauccgccuc

SEQ ID NO: 9614 - RNA, 12 nt, Artificial Sequence
  Synthetic
ccgcauccgccu

SEQ ID NO: 9615 - RNA, 12 nt, Artificial Sequence
  Synthetic
gccgcauccgcc

SEQ ID NO: 9616 - RNA, 12 nt, Artificial Sequence
  Synthetic
ggccgcauccgc

SEQ ID NO: 9617 - RNA, 12 nt, Artificial Sequence
  Synthetic
gggccgcauccg

SEQ ID NO: 9618 - RNA, 12 nt, Artificial Sequence
  Synthetic
ugggccgcaucc

SEQ ID NO: 9619 - RNA, 12 nt, Artificial Sequence
  Synthetic
cugggccgcauc

SEQ ID NO: 9620 - RNA, 12 nt, Artificial Sequence
  Synthetic
ccugggccgcau

SEQ ID NO: 9621 - RNA, 12 nt, Artificial Sequence
  Synthetic
cccugggccgca

SEQ ID NO: 9622 - RNA, 12 nt, Artificial Sequence
  Synthetic
ccccugggccgc

SEQ ID NO: 9623 - RNA, 12 nt, Artificial Sequence
  Synthetic
accccugggccg

SEQ ID NO: 9624 - RNA, 12 nt, Artificial Sequence
  Synthetic
uaccccugggcc

SEQ ID NO: 9625 - RNA, 12 nt, Artificial Sequence
  Synthetic
guaccccugggc

SEQ ID NO: 9626 - RNA, 12 nt, Artificial Sequence
  Synthetic
gguaccccuggg

SEQ ID NO: 9627 - RNA, 12 nt, Artificial Sequence
  Synthetic
cgguaccccugg

SEQ ID NO: 9628 - RNA, 12 nt, Artificial Sequence
  Synthetic
gcgguaccccug

SEQ ID NO: 9629 - RNA, 12 nt, Artificial Sequence
  Synthetic
agcgguaccccu

SEQ ID NO: 9630 - RNA, 12 nt, Artificial Sequence
  Synthetic
uagcgguacccc

SEQ ID NO: 9631 - RNA, 12 nt, Artificial Sequence
  Synthetic
guagcgguaccc

SEQ ID NO: 9632 - RNA, 12 nt, Artificial Sequence
  Synthetic
gguagcgguacc

SEQ ID NO: 9633 - RNA, 12 nt, Artificial Sequence
  Synthetic
ggguagcgguac

SEQ ID NO: 9634 - RNA, 12 nt, Artificial Sequence
  Synthetic
uggguagcggua

SEQ ID NO: 9635 - RNA, 12 nt, Artificial Sequence
  Synthetic
guggguagcggu

SEQ ID NO: 9636 - RNA, 12 nt, Artificial Sequence
  Synthetic
cguggguagcgg

SEQ ID NO: 9637 - RNA, 12 nt, Artificial Sequence
  Synthetic
ccguggguagcg

SEQ ID NO: 9638 - RNA, 12 nt, Artificial Sequence
  Synthetic
gccguggguagc

SEQ ID NO: 9639 - RNA, 12 nt, Artificial Sequence
  Synthetic
ggccguggguag

SEQ ID NO: 9640 - RNA, 12 nt, Artificial Sequence
  Synthetic
uggccgugggua

SEQ ID NO: 9641 - RNA, 12 nt, Artificial Sequence
  Synthetic
cuggccgugggu

SEQ ID NO: 9642 - RNA, 12 nt, Artificial Sequence
  Synthetic
gcuggccguggg

SEQ ID NO: 9643 - RNA, 12 nt, Artificial Sequence
  Synthetic
ggcuggccgugg

SEQ ID NO: 9644 - RNA, 12 nt, Artificial Sequence
  Synthetic
aggcuggccgug

SEQ ID NO: 9645 - RNA, 12 nt, Artificial Sequence
  Synthetic
gaggcuggccgu

SEQ ID NO: 9646 - RNA, 12 nt, Artificial Sequence
  Synthetic
cgaggcuggccg

SEQ ID NO: 9647 - RNA, 12 nt, Artificial Sequence
  Synthetic
ccgaggcuggcc

SEQ ID NO: 9648 - RNA, 12 nt, Artificial Sequence
  Synthetic
accgaggcuggc

SEQ ID NO: 9649 - RNA, 12 nt, Artificial Sequence
  Synthetic
caccgaggcugg

SEQ ID NO: 9650 - RNA, 12 nt, Artificial Sequence
  Synthetic
gcaccgaggcug

SEQ ID NO: 9651 - RNA, 12 nt, Artificial Sequence
  Synthetic
ggcaccgaggcu

SEQ ID NO: 9652 - RNA, 12 nt, Artificial Sequence
  Synthetic
uggcaccgaggc

SEQ ID NO: 9653 - RNA, 12 nt, Artificial Sequence
  Synthetic
guggcaccgagg

SEQ ID NO: 9654 - RNA, 12 nt, Artificial Sequence
  Synthetic
gguggcaccgag

SEQ ID NO: 9655 - RNA, 12 nt, Artificial Sequence
  Synthetic
cgguggcaccga

SEQ ID NO: 9656 - RNA, 12 nt, Artificial Sequence
  Synthetic
acgguggcaccg

SEQ ID NO: 9657 - RNA, 12 nt, Artificial Sequence
  Synthetic
gacgguggcacc

SEQ ID NO: 9658 - RNA, 12 nt, Artificial Sequence
  Synthetic
cgacgguggcac

SEQ ID NO: 9659 - RNA, 12 nt, Artificial Sequence
  Synthetic
gcgacgguggca

SEQ ID NO: 9660 - RNA, 12 nt, Artificial Sequence
  Synthetic
ggcgacgguggc

SEQ ID NO: 9661 - RNA, 12 nt, Artificial Sequence
  Synthetic
gggcgacggugg

SEQ ID NO: 9662 - RNA, 12 nt, Artificial Sequence
  Synthetic
agggcgacggug

SEQ ID NO: 9663 - RNA, 12 nt, Artificial Sequence
  Synthetic
gagggcgacggu

SEQ ID NO: 9664 - RNA, 12 nt, Artificial Sequence
  Synthetic
cgagggcgacgg

SEQ ID NO: 9665 - RNA, 12 nt, Artificial Sequence
  Synthetic
gcgagggcgacg

SEQ ID NO: 9666 - RNA, 12 nt, Artificial Sequence
  Synthetic
agcgagggcgac

SEQ ID NO: 9667 - RNA, 12 nt, Artificial Sequence
  Synthetic
cagcgagggcga

SEQ ID NO: 9668 - RNA, 12 nt, Artificial Sequence
  Synthetic
acagcgagggcg

SEQ ID NO: 9669 - RNA, 12 nt, Artificial Sequence
  Synthetic
gacagcgagggc

SEQ ID NO: 9670 - RNA, 12 nt, Artificial Sequence
  Synthetic
ugacagcgaggg

SEQ ID NO: 9671 - RNA, 12 nt, Artificial Sequence
  Synthetic
gugacagcgagg

SEQ ID NO: 9672 - RNA, 12 nt, Artificial Sequence
  Synthetic
cgugacagcgag

SEQ ID NO: 9673 - RNA, 12 nt, Artificial Sequence
  Synthetic
ucgugacagcga

SEQ ID NO: 9674 - RNA, 12 nt, Artificial Sequence
  Synthetic
gucgugacagcg

SEQ ID NO: 9675 - RNA, 12 nt, Artificial Sequence
  Synthetic
ugucgugacagc

SEQ ID NO: 9676 - RNA, 12 nt, Artificial Sequence
  Synthetic
gugucgugacag

SEQ ID NO: 9677 - RNA, 12 nt, Artificial Sequence
  Synthetic
agugucgugaca

SEQ ID NO: 9678 - RNA, 12 nt, Artificial Sequence
  Synthetic
gagugucgugac

SEQ ID NO: 9679 - RNA, 12 nt, Artificial Sequence
  Synthetic
ggagugucguga

SEQ ID NO: 9680 - RNA, 12 nt, Artificial Sequence
  Synthetic
uggagugucgug

SEQ ID NO: 9681 - RNA, 12 nt, Artificial Sequence
  Synthetic
cuggagugucgu

SEQ ID NO: 9682 - RNA, 12 nt, Artificial Sequence
  Synthetic
gcuggagugucg

SEQ ID NO: 9683 - RNA, 12 nt, Artificial Sequence
  Synthetic
ggcuggaguguc

SEQ ID NO: 9684 - RNA, 12 nt, Artificial Sequence
  Synthetic
gggcuggagugu

SEQ ID NO: 9685 - RNA, 12 nt, Artificial Sequence
  Synthetic
cgggcuggagug

SEQ ID NO: 9686 - RNA, 12 nt, Artificial Sequence
  Synthetic
gcgggcuggagu

SEQ ID NO: 9687 - RNA, 12 nt, Artificial Sequence
  Synthetic
ugcgggcuggag

SEQ ID NO: 9688 - RNA, 12 nt, Artificial Sequence
  Synthetic
gugcgggcugga

SEQ ID NO: 9689 - RNA, 12 nt, Artificial Sequence
  Synthetic
ggugcgggcugg

SEQ ID NO: 9690 - RNA, 12 nt, Artificial Sequence
  Synthetic
uggugcgggcug

SEQ ID NO: 9691 - RNA, 12 nt, Artificial Sequence
  Synthetic
cuggugcgggcu

SEQ ID NO: 9692 - RNA, 12 nt, Artificial Sequence
  Synthetic
ucuggugcgggc

SEQ ID NO: 9693 - RNA, 12 nt, Artificial Sequence
  Synthetic
cucuggugcggg

SEQ ID NO: 9694 - RNA, 12 nt, Artificial Sequence
  Synthetic
acucuggugcgg

SEQ ID NO: 9695 - RNA, 12 nt, Artificial Sequence
  Synthetic
cacucuggugcg

SEQ ID NO: 9696 - RNA, 12 nt, Artificial Sequence
  Synthetic
ucacucuggugc

SEQ ID NO: 9697 - RNA, 12 nt, Artificial Sequence
  Synthetic
cucacucuggug

SEQ ID NO: 9698 - RNA, 12 nt, Artificial Sequence
  Synthetic
ccucacucuggu

SEQ ID NO: 9699 - RNA, 12 nt, Artificial Sequence
  Synthetic
uccucacucugg

SEQ ID NO: 9700 - RNA, 12 nt, Artificial Sequence
  Synthetic
guccucacucug

SEQ ID NO: 9701 - RNA, 12 nt, Artificial Sequence
  Synthetic
cguccucacucu

SEQ ID NO: 9702 - RNA, 12 nt, Artificial Sequence
  Synthetic
ucguccucacuc

SEQ ID NO: 9703 - RNA, 12 nt, Artificial Sequence
  Synthetic
cucguccucacu

SEQ ID NO: 9704 - RNA, 12 nt, Artificial Sequence
  Synthetic
ccucguccucac

SEQ ID NO: 9705 - RNA, 12 nt, Artificial Sequence
  Synthetic
uccucguccuca

SEQ ID NO: 9706 - RNA, 12 nt, Artificial Sequence
  Synthetic
cuccucguccuc

SEQ ID NO: 9707 - RNA, 12 nt, Artificial Sequence
  Synthetic
ccuccucguccu

SEQ ID NO: 9708 - RNA, 12 nt, Artificial Sequence
  Synthetic
uccuccucgucc

SEQ ID NO: 9709 - RNA, 12 nt, Artificial Sequence
  Synthetic
auccuccucguc

SEQ ID NO: 9710 - RNA, 12 nt, Artificial Sequence
  Synthetic
gauccuccucgu

SEQ ID NO: 9711 - RNA, 12 nt, Artificial Sequence
  Synthetic
ggauccuccucg

SEQ ID NO: 9712 - RNA, 12 nt, Artificial Sequence
  Synthetic
gggauccuccuc

SEQ ID NO: 9713 - RNA, 12 nt, Artificial Sequence
  Synthetic
ggggauccuccu

SEQ ID NO: 9714 - RNA, 12 nt, Artificial Sequence
  Synthetic
cggggauccucc

SEQ ID NO: 9715 - RNA, 12 nt, Artificial Sequence
  Synthetic
ccggggauccuc

SEQ ID NO: 9716 - RNA, 12 nt, Artificial Sequence
  Synthetic
uccggggauccu

SEQ ID NO: 9717 - RNA, 12 nt, Artificial Sequence
  Synthetic
uuccggggaucc

SEQ ID NO: 9718 - RNA, 12 nt, Artificial Sequence
  Synthetic
guuccggggauc

SEQ ID NO: 9719 - RNA, 12 nt, Artificial Sequence
  Synthetic
cguuccggggau

SEQ ID NO: 9720 - RNA, 12 nt, Artificial Sequence
  Synthetic
ccguuccgggga

SEQ ID NO: 9721 - RNA, 12 nt, Artificial Sequence
  Synthetic
cccguuccgggg

SEQ ID NO: 9722 - RNA, 12 nt, Artificial Sequence
  Synthetic
gcccguuccggg

SEQ ID NO: 9723 - RNA, 12 nt, Artificial Sequence
  Synthetic
ggcccguuccgg

SEQ ID NO: 9724 - RNA, 12 nt, Artificial Sequence
  Synthetic
cggcccguuccg

SEQ ID NO: 9725 - RNA, 12 nt, Artificial Sequence
  Synthetic
gcggcccguucc

SEQ ID NO: 9726 - RNA, 12 nt, Artificial Sequence
  Synthetic
agcggcccguuc

SEQ ID NO: 9727 - RNA, 12 nt, Artificial Sequence
  Synthetic
cagcggcccguu

SEQ ID NO: 9728 - RNA, 12 nt, Artificial Sequence
  Synthetic
ccagcggcccgu

SEQ ID NO: 9729 - RNA, 12 nt, Artificial Sequence
  Synthetic
uccagcggcccg

SEQ ID NO: 9730 - RNA, 12 nt, Artificial Sequence
  Synthetic
cuccagcggccc

SEQ ID NO: 9731 - RNA, 12 nt, Artificial Sequence
  Synthetic
ccuccagcggcc

SEQ ID NO: 9732 - RNA, 12 nt, Artificial Sequence
  Synthetic
uccuccagcggc

SEQ ID NO: 9733 - RNA, 12 nt, Artificial Sequence
  Synthetic
uuccuccagcgg

SEQ ID NO: 9734 - RNA, 12 nt, Artificial Sequence
  Synthetic
cuuccuccagcg

SEQ ID NO: 9735 - RNA, 12 nt, Artificial Sequence
  Synthetic
ucuuccuccagc

SEQ ID NO: 9736 - RNA, 12 nt, Artificial Sequence
  Synthetic
gucuuccuccag

SEQ ID NO: 9737 - RNA, 12 nt, Artificial Sequence
  Synthetic
cgucuuccucca

SEQ ID NO: 9738 - RNA, 12 nt, Artificial Sequence
  Synthetic
ccgucuuccucc

SEQ ID NO: 9739 - RNA, 12 nt, Artificial Sequence
  Synthetic
gccgucuuccuc

SEQ ID NO: 9740 - RNA, 12 nt, Artificial Sequence
  Synthetic
cgccgucuuccu

SEQ ID NO: 9741 - RNA, 12 nt, Artificial Sequence
  Synthetic
ucgccgucuucc

SEQ ID NO: 9742 - RNA, 12 nt, Artificial Sequence
  Synthetic
cucgccgucuuc

SEQ ID NO: 9743 - RNA, 12 nt, Artificial Sequence
  Synthetic
gcucgccgucuu

SEQ ID NO: 9744 - RNA, 12 nt, Artificial Sequence
  Synthetic
cgcucgccgucu

SEQ ID NO: 9745 - RNA, 12 nt, Artificial Sequence
  Synthetic
gcgcucgccguc

SEQ ID NO: 9746 - RNA, 12 nt, Artificial Sequence
  Synthetic
agcgcucgccgu

SEQ ID NO: 9747 - RNA, 12 nt, Artificial Sequence
  Synthetic
uagcgcucgccg

SEQ ID NO: 9748 - RNA, 12 nt, Artificial Sequence
  Synthetic
guagcgcucgcc

SEQ ID NO: 9749 - RNA, 12 nt, Artificial Sequence
  Synthetic
cguagcgcucgc

SEQ ID NO: 9750 - RNA, 12 nt, Artificial Sequence
  Synthetic
ucguagcgcucg

SEQ ID NO: 9751 - RNA, 12 nt, Artificial Sequence
  Synthetic
aucguagcgcuc

SEQ ID NO: 9752 - RNA, 12 nt, Artificial Sequence
  Synthetic
caucguagcgcu

SEQ ID NO: 9753 - RNA, 12 nt, Artificial Sequence
  Synthetic
ucaucguagcgc

SEQ ID NO: 9754 - RNA, 12 nt, Artificial Sequence
  Synthetic
cucaucguagcg

SEQ ID NO: 9755 - RNA, 12 nt, Artificial Sequence
  Synthetic
ccucaucguagc

SEQ ID NO: 9756 - RNA, 12 nt, Artificial Sequence
  Synthetic
uccucaucguag

SEQ ID NO: 9757 - RNA, 12 nt, Artificial Sequence
  Synthetic
guccucaucgua

SEQ ID NO: 9758 - RNA, 12 nt, Artificial Sequence
  Synthetic
cguccucaucgu

SEQ ID NO: 9759 - RNA, 12 nt, Artificial Sequence
  Synthetic
ucguccucaucg

SEQ ID NO: 9760 - RNA, 12 nt, Artificial Sequence
  Synthetic
cucguccucauc

SEQ ID NO: 9761 - RNA, 12 nt, Artificial Sequence
  Synthetic
ccucguccucau

SEQ ID NO: 9762 - RNA, 12 nt, Artificial Sequence
  Synthetic
gccuccucgucc

SEQ ID NO: 9763 - RNA, 12 nt, Artificial Sequence
  Synthetic
ggccuccucguc

SEQ ID NO: 9764 - RNA, 12 nt, Artificial Sequence
  Synthetic
cggccuccucgu

SEQ ID NO: 9765 - RNA, 12 nt, Artificial Sequence
  Synthetic
gcggccuccucg

SEQ ID NO: 9766 - RNA, 12 nt, Artificial Sequence
  Synthetic
ggcggccuccuc

SEQ ID NO: 9767 - RNA, 12 nt, Artificial Sequence
  Synthetic
uggcggccuccu

SEQ ID NO: 9768 - RNA, 12 nt, Artificial Sequence
  Synthetic
uuggcggccucc

SEQ ID NO: 9769 - RNA, 12 nt, Artificial Sequence
  Synthetic
cuuggcggccuc

SEQ ID NO: 9770 - RNA, 12 nt, Artificial Sequence
  Synthetic
ccuuggcggccu

SEQ ID NO: 9771 - RNA, 12 nt, Artificial Sequence
  Synthetic
uccuuggcggcc

SEQ ID NO: 9772 - RNA, 12 nt, Artificial Sequence
  Synthetic
guccuuggcggc

SEQ ID NO: 9773 - RNA, 12 nt, Artificial Sequence
  Synthetic
gguccuuggcgg

SEQ ID NO: 9774 - RNA, 12 nt, Artificial Sequence
  Synthetic
cgguccuuggcg

SEQ ID NO: 9775 - RNA, 12 nt, Artificial Sequence
  Synthetic
ccgguccuuggc

SEQ ID NO: 9776 - RNA, 12 nt, Artificial Sequence
  Synthetic
gccgguccuugg

SEQ ID NO: 9777 - RNA, 12 nt, Artificial Sequence
  Synthetic
cgccgguccuug

SEQ ID NO: 9778 - RNA, 12 nt, Artificial Sequence
  Synthetic
gcgccgguccuu

SEQ ID NO: 9779 - RNA, 12 nt, Artificial Sequence
  Synthetic
ugcgccgguccu

SEQ ID NO: 9780 - RNA, 12 nt, Artificial Sequence
  Synthetic
uugcgccggucc

SEQ ID NO: 9781 - RNA, 12 nt, Artificial Sequence
  Synthetic
guugcgccgguc

SEQ ID NO: 9782 - RNA, 12 nt, Artificial Sequence
  Synthetic
uguugcgccggu

SEQ ID NO: 9783 - RNA, 12 nt, Artificial Sequence
  Synthetic
auguugcgccgg

SEQ ID NO: 9784 - RNA, 12 nt, Artificial Sequence
  Synthetic
gauguugcgccg

SEQ ID NO: 9785 - RNA, 12 nt, Artificial Sequence
  Synthetic
ggauguugcgcc

SEQ ID NO: 9786 - RNA, 12 nt, Artificial Sequence
  Synthetic
cggauguugcgc

SEQ ID NO: 9787 - RNA, 12 nt, Artificial Sequence
  Synthetic
acggauguugcg

SEQ ID NO: 9788 - RNA, 12 nt, Artificial Sequence
  Synthetic
cacggauguugc

SEQ ID NO: 9789 - RNA, 12 nt, Artificial Sequence
  Synthetic
gcacggauguug

SEQ ID NO: 9790 - RNA, 12 nt, Artificial Sequence
  Synthetic
ugcacggauguu

SEQ ID NO: 9791 - RNA, 12 nt, Artificial Sequence
  Synthetic
gugcacggaugu

SEQ ID NO: 9792 - RNA, 12 nt, Artificial Sequence
  Synthetic
ggugcacggaug

SEQ ID NO: 9793 - RNA, 12 nt, Artificial Sequence
  Synthetic
uggugcacggau

SEQ ID NO: 9794 - RNA, 12 nt, Artificial Sequence
  Synthetic
cuggugcacgga

SEQ ID NO: 9795 - RNA, 12 nt, Artificial Sequence
  Synthetic
ucuggugcacgg

SEQ ID NO: 9796 - RNA, 12 nt, Artificial Sequence
  Synthetic
cucuggugcacg

SEQ ID NO: 9797 - RNA, 12 nt, Artificial Sequence
  Synthetic
acucuggugcac

SEQ ID NO: 9798 - RNA, 12 nt, Artificial Sequence
  Synthetic
cacucuggugca

SEQ ID NO: 9799 - RNA, 12 nt, Artificial Sequence
  Synthetic
ccacucuggugc

SEQ ID NO: 9800 - RNA, 12 nt, Artificial Sequence
  Synthetic
gccacucuggug

SEQ ID NO: 9801 - RNA, 12 nt, Artificial Sequence
  Synthetic
ggccacucuggu

SEQ ID NO: 9802 - RNA, 12 nt, Artificial Sequence
  Synthetic
cggccacucugg

SEQ ID NO: 9803 - RNA, 12 nt, Artificial Sequence
  Synthetic
gcggccacucug

SEQ ID NO: 9804 - RNA, 12 nt, Artificial Sequence
  Synthetic
cgcggccacucu

SEQ ID NO: 9805 - RNA, 12 nt, Artificial Sequence
  Synthetic
gcgcggccacuc

SEQ ID NO: 9806 - RNA, 12 nt, Artificial Sequence
  Synthetic
ggcgcggccacu

SEQ ID NO: 9807 - RNA, 12 nt, Artificial Sequence
  Synthetic
cggcgcggccac

SEQ ID NO: 9808 - RNA, 12 nt, Artificial Sequence
  Synthetic
ucggcgcggcca

SEQ ID NO: 9809 - RNA, 12 nt, Artificial Sequence
  Synthetic
cucggcgcggcc

SEQ ID NO: 9810 - RNA, 12 nt, Artificial Sequence
  Synthetic
gcucggcgcggc

SEQ ID NO: 9811 - RNA, 12 nt, Artificial Sequence
  Synthetic
cgcucggcgcgg

SEQ ID NO: 9812 - RNA, 12 nt, Artificial Sequence
  Synthetic
acgcucggcgcg

SEQ ID NO: 9813 - RNA, 12 nt, Artificial Sequence
  Synthetic
gacgcucggcgc

SEQ ID NO: 9814 - RNA, 12 nt, Artificial Sequence
  Synthetic
ggacgcucggcg

SEQ ID NO: 9815 - RNA, 12 nt, Artificial Sequence
  Synthetic
aggacgcucggc

SEQ ID NO: 9816 - RNA, 12 nt, Artificial Sequence
  Synthetic
caggacgcucgg

SEQ ID NO: 9817 - RNA, 12 nt, Artificial Sequence
  Synthetic
gcaggacgcucg

SEQ ID NO: 9818 - RNA, 12 nt, Artificial Sequence
  Synthetic
ugcaggacgcuc

SEQ ID NO: 9819 - RNA, 12 nt, Artificial Sequence
  Synthetic
gugcaggacgcu

SEQ ID NO: 9820 - RNA, 12 nt, Artificial Sequence
  Synthetic
ggugcaggacgc

SEQ ID NO: 9821 - RNA, 12 nt, Artificial Sequence
  Synthetic
aggugcaggacg

SEQ ID NO: 9822 - RNA, 12 nt, Artificial Sequence
  Synthetic
gaggugcaggac

SEQ ID NO: 9823 - RNA, 12 nt, Artificial Sequence
  Synthetic
ggaggugcagga

SEQ ID NO: 9824 - RNA, 12 nt, Artificial Sequence
  Synthetic
aggaggugcagg

SEQ ID NO: 9825 - RNA, 12 nt, Artificial Sequence
  Synthetic
gaggaggugcag

SEQ ID NO: 9826 - RNA, 12 nt, Artificial Sequence
  Synthetic
ggaggaggugca

SEQ ID NO: 9827 - RNA, 12 nt, Artificial Sequence
  Synthetic
uggaggaggugc

SEQ ID NO: 9828 - RNA, 12 nt, Artificial Sequence
  Synthetic
guggaggaggug

SEQ ID NO: 9829 - RNA, 12 nt, Artificial Sequence
  Synthetic
gguggaggaggu

SEQ ID NO: 9830 - RNA, 12 nt, Artificial Sequence
  Synthetic
ugguggaggagg

SEQ ID NO: 9831 - RNA, 12 nt, Artificial Sequence
  Synthetic
cugguggaggag

SEQ ID NO: 9832 - RNA, 12 nt, Artificial Sequence
  Synthetic
gcugguggagga

SEQ ID NO: 9833 - RNA, 12 nt, Artificial Sequence
  Synthetic
cgcugguggagg

SEQ ID NO: 9834 - RNA, 12 nt, Artificial Sequence
  Synthetic
ccgcugguggag

SEQ ID NO: 9835 - RNA, 12 nt, Artificial Sequence
  Synthetic
gccgcuggugga

SEQ ID NO: 9836 - RNA, 12 nt, Artificial Sequence
  Synthetic
ugccgcuggugg

SEQ ID NO: 9837 - RNA, 12 nt, Artificial Sequence
  Synthetic
cugccgcuggug

SEQ ID NO: 9838 - RNA, 12 nt, Artificial Sequence
  Synthetic
gcugccgcuggu

SEQ ID NO: 9839 - RNA, 12 nt, Artificial Sequence
  Synthetic
ugcugccgcugg

SEQ ID NO: 9840 - RNA, 12 nt, Artificial Sequence
  Synthetic
uugcugccgcug

SEQ ID NO: 9841 - RNA, 12 nt, Artificial Sequence
  Synthetic
cuugcugccgcu

SEQ ID NO: 9842 - RNA, 12 nt, Artificial Sequence
  Synthetic
gcuugcugccgc

SEQ ID NO: 9843 - RNA, 12 nt, Artificial Sequence
  Synthetic
cgcuugcugccg

SEQ ID NO: 9844 - RNA, 12 nt, Artificial Sequence
  Synthetic
gcgcuugcugcc

SEQ ID NO: 9845 - RNA, 12 nt, Artificial Sequence
  Synthetic
ugcgcuugcugc

SEQ ID NO: 9846 - RNA, 12 nt, Artificial Sequence
  Synthetic
uugcgcuugcug

SEQ ID NO: 9847 - RNA, 12 nt, Artificial Sequence
  Synthetic
guugcgcuugcu

SEQ ID NO: 9848 - RNA, 12 nt, Artificial Sequence
  Synthetic
aguugcgcuugc

SEQ ID NO: 9849 - RNA, 12 nt, Artificial Sequence
  Synthetic
gaguugcgcuug

SEQ ID NO: 9850 - RNA, 12 nt, Artificial Sequence
  Synthetic
agaguugcgcuu

SEQ ID NO: 9851 - RNA, 12 nt, Artificial Sequence
  Synthetic
cagaguugcgcu

SEQ ID NO: 9852 - RNA, 12 nt, Artificial Sequence
  Synthetic
acagaguugcgc

SEQ ID NO: 9853 - RNA, 12 nt, Artificial Sequence
  Synthetic
cacagaguugcg

SEQ ID NO: 9854 - RNA, 12 nt, Artificial Sequence
  Synthetic
ccacagaguugc

SEQ ID NO: 9855 - RNA, 12 nt, Artificial Sequence
  Synthetic
uccacagaguug

SEQ ID NO: 9856 - RNA, 12 nt, Artificial Sequence
  Synthetic
guccacagaguu

SEQ ID NO: 9857 - RNA, 12 nt, Artificial Sequence
  Synthetic
uguccacagagu

SEQ ID NO: 9858 - RNA, 12 nt, Artificial Sequence
  Synthetic
guguccacagag

SEQ ID NO: 9859 - RNA, 12 nt, Artificial Sequence
  Synthetic
cguguccacaga

SEQ ID NO: 9860 - RNA, 12 nt, Artificial Sequence
  Synthetic
ccguguccacag

SEQ ID NO: 9861 - RNA, 12 nt, Artificial Sequence
  Synthetic
gccguguccaca

SEQ ID NO: 9862 - RNA, 12 nt, Artificial Sequence
  Synthetic
ggccguguccac

SEQ ID NO: 9863 - RNA, 12 nt, Artificial Sequence
  Synthetic
uggccgugucca

SEQ ID NO: 9864 - RNA, 12 nt, Artificial Sequence
  Synthetic
guggccgugucc

SEQ ID NO: 9865 - RNA, 12 nt, Artificial Sequence
  Synthetic
gguggccguguc

SEQ ID NO: 9866 - RNA, 12 nt, Artificial Sequence
  Synthetic
agguggccgugu

SEQ ID NO: 9867 - RNA, 12 nt, Artificial Sequence
  Synthetic
gagguggccgug

SEQ ID NO: 9868 - RNA, 12 nt, Artificial Sequence
  Synthetic
ggagguggccgu

SEQ ID NO: 9869 - RNA, 12 nt, Artificial Sequence
  Synthetic
uggagguggccg

SEQ ID NO: 9870 - RNA, 12 nt, Artificial Sequence
  Synthetic
cuggagguggcc

SEQ ID NO: 9871 - RNA, 12 nt, Artificial Sequence
  Synthetic
gcuggagguggc

SEQ ID NO: 9872 - RNA, 12 nt, Artificial Sequence
  Synthetic
agcuggaggugg

SEQ ID NO: 9873 - RNA, 12 nt, Artificial Sequence
  Synthetic
gagcuggaggug

SEQ ID NO: 9874 - RNA, 12 nt, Artificial Sequence
  Synthetic
ugagcuggaggu

SEQ ID NO: 9875 - RNA, 12 nt, Artificial Sequence
  Synthetic
gugagcuggagg

SEQ ID NO: 9876 - RNA, 12 nt, Artificial Sequence
  Synthetic
agugagcuggag

SEQ ID NO: 9877 - RNA, 12 nt, Artificial Sequence
  Synthetic
gagugagcugga

SEQ ID NO: 9878 - RNA, 12 nt, Artificial Sequence
  Synthetic
ugagugagcugg

SEQ ID NO: 9879 - RNA, 12 nt, Artificial Sequence
  Synthetic
cugagugagcug

SEQ ID NO: 9880 - RNA, 12 nt, Artificial Sequence
  Synthetic
gcugagugagcu

SEQ ID NO: 9881 - RNA, 12 nt, Artificial Sequence
  Synthetic
ugcugagugagc

SEQ ID NO: 9882 - RNA, 12 nt, Artificial Sequence
  Synthetic
gugcugagugag

SEQ ID NO: 9883 - RNA, 12 nt, Artificial Sequence
  Synthetic
ggugcugaguga

SEQ ID NO: 9884 - RNA, 12 nt, Artificial Sequence
  Synthetic
gggugcugagug

SEQ ID NO: 9885 - RNA, 12 nt, Artificial Sequence
  Synthetic
ggggugcugagu

SEQ ID NO: 9886 - RNA, 12 nt, Artificial Sequence
  Synthetic
cggggugcugag

SEQ ID NO: 9887 - RNA, 12 nt, Artificial Sequence
  Synthetic
ucggggugcuga

SEQ ID NO: 9888 - RNA, 12 nt, Artificial Sequence
  Synthetic
cucggggugcug

SEQ ID NO: 9889 - RNA, 12 nt, Artificial Sequence
  Synthetic
gcucggggugcu

SEQ ID NO: 9890 - RNA, 12 nt, Artificial Sequence
  Synthetic
cgcucggggugc

SEQ ID NO: 9891 - RNA, 12 nt, Artificial Sequence
  Synthetic
ucgcucggggug

SEQ ID NO: 9892 - RNA, 12 nt, Artificial Sequence
  Synthetic
cucgcucggggu

SEQ ID NO: 9893 - RNA, 12 nt, Artificial Sequence
  Synthetic
gcucgcucgggg

SEQ ID NO: 9894 - RNA, 12 nt, Artificial Sequence
  Synthetic
ggcucgcucggg

SEQ ID NO: 9895 - RNA, 12 nt, Artificial Sequence
  Synthetic
gggcucgcucgg

SEQ ID NO: 9896 - RNA, 12 nt, Artificial Sequence
  Synthetic
ggggcucgcucg

SEQ ID NO: 9897 - RNA, 12 nt, Artificial Sequence
  Synthetic
aggggcucgcuc

SEQ ID NO: 9898 - RNA, 12 nt, Artificial Sequence
  Synthetic
gaggggcucgcu

SEQ ID NO: 9899 - RNA, 12 nt, Artificial Sequence
  Synthetic
ugaggggcucgc

SEQ ID NO: 9900 - RNA, 12 nt, Artificial Sequence
  Synthetic
cugaggggcucg

SEQ ID NO: 9901 - RNA, 12 nt, Artificial Sequence
  Synthetic
gcugaggggcuc

SEQ ID NO: 9902 - RNA, 12 nt, Artificial Sequence
  Synthetic
ggcugaggggcu

SEQ ID NO: 9903 - RNA, 12 nt, Artificial Sequence
  Synthetic
gggcugaggggc

SEQ ID NO: 9904 - RNA, 12 nt, Artificial Sequence
  Synthetic
ggggcugagggg

SEQ ID NO: 9905 - RNA, 12 nt, Artificial Sequence
  Synthetic
uggggcugaggg

SEQ ID NO: 9906 - RNA, 12 nt, Artificial Sequence
  Synthetic
guggggcugagg

SEQ ID NO: 9907 - RNA, 12 nt, Artificial Sequence
  Synthetic
gguggggcugag

SEQ ID NO: 9908 - RNA, 12 nt, Artificial Sequence
  Synthetic
ugguggggcuga

SEQ ID NO: 9909 - RNA, 12 nt, Artificial Sequence
  Synthetic
cugguggggcug

SEQ ID NO: 9910 - RNA, 12 nt, Artificial Sequence
  Synthetic
gcugguggggcu

SEQ ID NO: 9911 - RNA, 12 nt, Artificial Sequence
  Synthetic
agcugguggggc

SEQ ID NO: 9912 - RNA, 12 nt, Artificial Sequence
  Synthetic
gagcuggugggg

SEQ ID NO: 9913 - RNA, 12 nt, Artificial Sequence
  Synthetic
ggagcugguggg

SEQ ID NO: 9914 - RNA, 12 nt, Artificial Sequence
  Synthetic
gggagcuggugg

SEQ ID NO: 9915 - RNA, 12 nt, Artificial Sequence
  Synthetic
agggagcuggug

SEQ ID NO: 9916 - RNA, 12 nt, Artificial Sequence
  Synthetic
cagggagcuggu

SEQ ID NO: 9917 - RNA, 12 nt, Artificial Sequence
  Synthetic
ccagggagcugg

SEQ ID NO: 9918 - RNA, 12 nt, Artificial Sequence
  Synthetic
cccagggagcug

SEQ ID NO: 9919 - RNA, 12 nt, Artificial Sequence
  Synthetic
gcccagggagcu

SEQ ID NO: 9920 - RNA, 12 nt, Artificial Sequence
  Synthetic
cgcccagggagc

SEQ ID NO: 9921 - RNA, 12 nt, Artificial Sequence
  Synthetic
ucgcccagggag

SEQ ID NO: 9922 - RNA, 12 nt, Artificial Sequence
  Synthetic
cucgcccaggga

SEQ ID NO: 9923 - RNA, 12 nt, Artificial Sequence
  Synthetic
ccucgcccaggg

SEQ ID NO: 9924 - RNA, 12 nt, Artificial Sequence
  Synthetic
uccucgcccagg

SEQ ID NO: 9925 - RNA, 12 nt, Artificial Sequence
  Synthetic
cuccucgcccag

SEQ ID NO: 9926 - RNA, 12 nt, Artificial Sequence
  Synthetic
gcuccucgccca

SEQ ID NO: 9927 - RNA, 12 nt, Artificial Sequence
  Synthetic
cgcuccucgccc

SEQ ID NO: 9928 - RNA, 12 nt, Artificial Sequence
  Synthetic
acgcuccucgcc

SEQ ID NO: 9929 - RNA, 12 nt, Artificial Sequence
  Synthetic
uacgcuccucgc

SEQ ID NO: 9930 - RNA, 12 nt, Artificial Sequence
  Synthetic
uuacgcuccucg

SEQ ID NO: 9931 - RNA, 12 nt, Artificial Sequence
  Synthetic
guuacgcuccuc

SEQ ID NO: 9932 - RNA, 12 nt, Artificial Sequence
  Synthetic
aguuacgcuccu

SEQ ID NO: 9933 - RNA, 12 nt, Artificial Sequence
  Synthetic
uaguuacgcucc

SEQ ID NO: 9934 - RNA, 12 nt, Artificial Sequence
  Synthetic
uuaguuacgcuc

SEQ ID NO: 9935 - RNA, 12 nt, Artificial Sequence
  Synthetic
cuuaguuacgcu

SEQ ID NO: 9936 - RNA, 12 nt, Artificial Sequence
  Synthetic
acuuaguuacgc

SEQ ID NO: 9937 - RNA, 12 nt, Artificial Sequence
  Synthetic
gacuuaguuacg

SEQ ID NO: 9938 - RNA, 12 nt, Artificial Sequence
  Synthetic
ggacuuaguuac

SEQ ID NO: 9939 - RNA, 12 nt, Artificial Sequence
  Synthetic
cggacuuaguua

SEQ ID NO: 9940 - RNA, 12 nt, Artificial Sequence
  Synthetic
gcggacuuaguu

SEQ ID NO: 9941 - RNA, 12 nt, Artificial Sequence
  Synthetic
ggcggacuuagu

SEQ ID NO: 9942 - RNA, 12 nt, Artificial Sequence
  Synthetic
gggcggacuuag

SEQ ID NO: 9943 - RNA, 12 nt, Artificial Sequence
  Synthetic
ggggcggacuua

SEQ ID NO: 9944 - RNA, 12 nt, Artificial Sequence
  Synthetic
uggggcggacuu

SEQ ID NO: 9945 - RNA, 12 nt, Artificial Sequence
  Synthetic
guggggcggacu

SEQ ID NO: 9946 - RNA, 12 nt, Artificial Sequence
  Synthetic
gguggggcggac

SEQ ID NO: 9947 - RNA, 12 nt, Artificial Sequence
  Synthetic
ugguggggcgga

SEQ ID NO: 9948 - RNA, 12 nt, Artificial Sequence
  Synthetic
gugguggggcgg

SEQ ID NO: 9949 - RNA, 12 nt, Artificial Sequence
  Synthetic
ugugguggggcg

SEQ ID NO: 9950 - RNA, 12 nt, Artificial Sequence
  Synthetic
gugugguggggc

SEQ ID NO: 9951 - RNA, 12 nt, Artificial Sequence
  Synthetic
aguguggugggg

SEQ ID NO: 9952 - RNA, 12 nt, Artificial Sequence
  Synthetic
gagugugguggg

SEQ ID NO: 9953 - RNA, 12 nt, Artificial Sequence
  Synthetic
ggaguguggugg

SEQ ID NO: 9954 - RNA, 12 nt, Artificial Sequence
  Synthetic
gggaguguggug

SEQ ID NO: 9955 - RNA, 12 nt, Artificial Sequence
  Synthetic
ggggaguguggu

SEQ ID NO: 9956 - RNA, 12 nt, Artificial Sequence
  Synthetic
cggggagugugg

SEQ ID NO: 9957 - RNA, 12 nt, Artificial Sequence
  Synthetic
gcggggagugug

SEQ ID NO: 9958 - RNA, 12 nt, Artificial Sequence
  Synthetic
ggcggggagugu

SEQ ID NO: 9959 - RNA, 12 nt, Artificial Sequence
  Synthetic
aggcggggagug

SEQ ID NO: 9960 - RNA, 12 nt, Artificial Sequence
  Synthetic
caggcggggagu

SEQ ID NO: 9961 - RNA, 12 nt, Artificial Sequence
  Synthetic
acaggcggggag

SEQ ID NO: 9962 - RNA, 12 nt, Artificial Sequence
  Synthetic
gacaggcgggga

SEQ ID NO: 9963 - RNA, 12 nt, Artificial Sequence
  Synthetic
ggacaggcgggg

SEQ ID NO: 9964 - RNA, 12 nt, Artificial Sequence
  Synthetic
aggacaggcggg

SEQ ID NO: 9965 - RNA, 12 nt, Artificial Sequence
  Synthetic
caggacaggcgg

SEQ ID NO: 9966 - RNA, 12 nt, Artificial Sequence
  Synthetic
gcaggacaggcg

SEQ ID NO: 9967 - RNA, 12 nt, Artificial Sequence
  Synthetic
ggcaggacaggc

SEQ ID NO: 9968 - RNA, 12 nt, Artificial Sequence
  Synthetic
aggcaggacagg

SEQ ID NO: 9969 - RNA, 12 nt, Artificial Sequence
  Synthetic
gaggcaggacag

SEQ ID NO: 9970 - RNA, 12 nt, Artificial Sequence
  Synthetic
agaggcaggaca

SEQ ID NO: 9971 - RNA, 12 nt, Artificial Sequence
  Synthetic
gagaggcaggac

SEQ ID NO: 9972 - RNA, 12 nt, Artificial Sequence
  Synthetic
agagaggcagga

SEQ ID NO: 9973 - RNA, 12 nt, Artificial Sequence
  Synthetic
cagagaggcagg

SEQ ID NO: 9974 - RNA, 12 nt, Artificial Sequence
  Synthetic
gcagagaggcag

SEQ ID NO: 9975 - RNA, 12 nt, Artificial Sequence
  Synthetic
agcagagaggca

SEQ ID NO: 9976 - RNA, 12 nt, Artificial Sequence
  Synthetic
gagcagagaggc

SEQ ID NO: 9977 - RNA, 12 nt, Artificial Sequence
  Synthetic
ggagcagagagg

SEQ ID NO: 9978 - RNA, 12 nt, Artificial Sequence
  Synthetic
uggagcagagag

SEQ ID NO: 9979 - RNA, 12 nt, Artificial Sequence
  Synthetic
cuggagcagaga

SEQ ID NO: 9980 - RNA, 12 nt, Artificial Sequence
  Synthetic
ucuggagcagag

SEQ ID NO: 9981 - RNA, 12 nt, Artificial Sequence
  Synthetic
cucuggagcaga

SEQ ID NO: 9982 - RNA, 12 nt, Artificial Sequence
  Synthetic
ucucuggagcag

SEQ ID NO: 9983 - RNA, 12 nt, Artificial Sequence
  Synthetic
cucucuggagca

SEQ ID NO: 9984 - RNA, 12 nt, Artificial Sequence
  Synthetic
ucucucuggagc

SEQ ID NO: 9985 - RNA, 12 nt, Artificial Sequence
  Synthetic
cucucucuggag

SEQ ID NO: 9986 - RNA, 12 nt, Artificial Sequence
  Synthetic
ccucucucugga

SEQ ID NO: 9987 - RNA, 12 nt, Artificial Sequence
  Synthetic
uccucucucugg

SEQ ID NO: 9988 - RNA, 12 nt, Artificial Sequence
  Synthetic
auccucucucug

SEQ ID NO: 9989 - RNA, 12 nt, Artificial Sequence
  Synthetic
cauccucucucu

SEQ ID NO: 9990 - RNA, 12 nt, Artificial Sequence
  Synthetic
gcauccucucuc

SEQ ID NO: 9991 - RNA, 12 nt, Artificial Sequence
  Synthetic
ugcauccucucu

SEQ ID NO: 9992 - RNA, 12 nt, Artificial Sequence
  Synthetic
cugcauccucuc

SEQ ID NO: 9993 - RNA, 12 nt, Artificial Sequence
  Synthetic
ucugcauccucu

SEQ ID NO: 9994 - RNA, 12 nt, Artificial Sequence
  Synthetic
cucugcauccuc

SEQ ID NO: 9995 - RNA, 12 nt, Artificial Sequence
  Synthetic
ccucugcauccu

SEQ ID NO: 9996 - RNA, 12 nt, Artificial Sequence
  Synthetic
cccucugcaucc

SEQ ID NO: 9997 - RNA, 12 nt, Artificial Sequence
  Synthetic
ccccucugcauc

SEQ ID NO: 9998 - RNA, 12 nt, Artificial Sequence
  Synthetic
accccucugcau

SEQ ID NO: 9999 - RNA, 12 nt, Artificial Sequence
  Synthetic
caccccucugca

SEQ ID NO: 10000 - RNA, 12 nt, Artificial Sequence
  Synthetic
gcaccccucugc

SEQ ID NO: 10001 - RNA, 12 nt, Artificial Sequence
  Synthetic
agcaccccucug

SEQ ID NO: 10002 - RNA, 12 nt, Artificial Sequence
  Synthetic
cagcaccccucu

SEQ ID NO: 10003 - RNA, 12 nt, Artificial Sequence
  Synthetic
gcagcaccccuc

SEQ ID NO: 10004 - RNA, 12 nt, Artificial Sequence
  Synthetic
agcagcaccccu

SEQ ID NO: 10005 - RNA, 12 nt, Artificial Sequence
  Synthetic
gagcagcacccc

SEQ ID NO: 10006 - RNA, 12 nt, Artificial Sequence
  Synthetic
ggagcagcaccc

SEQ ID NO: 10007 - RNA, 12 nt, Artificial Sequence
  Synthetic
aggagcagcacc

SEQ ID NO: 10008 - RNA, 12 nt, Artificial Sequence
  Synthetic
uaggagcagcac

SEQ ID NO: 10009 - RNA, 12 nt, Artificial Sequence
  Synthetic
uuaggagcagca

SEQ ID NO: 10010 - RNA, 12 nt, Artificial Sequence
  Synthetic
uuuaggagcagc

SEQ ID NO: 10011 - RNA, 12 nt, Artificial Sequence
  Synthetic
guuuaggagcag

SEQ ID NO: 10012 - RNA, 12 nt, Artificial Sequence
  Synthetic
gguuuaggagca

SEQ ID NO: 10013 - RNA, 12 nt, Artificial Sequence
  Synthetic
ggguuuaggagc

SEQ ID NO: 10014 - RNA, 12 nt, Artificial Sequence
  Synthetic
gggguuuaggag

SEQ ID NO: 10015 - RNA, 12 nt, Artificial Sequence
  Synthetic
ggggguuuagga

SEQ ID NO: 10016 - RNA, 12 nt, Artificial Sequence
  Synthetic
cggggguuuagg

SEQ ID NO: 10017 - RNA, 12 nt, Artificial Sequence
  Synthetic
gcggggguuuag

SEQ ID NO: 10018 - RNA, 12 nt, Artificial Sequence
  Synthetic
agcggggguuua

SEQ ID NO: 10019 - RNA, 12 nt, Artificial Sequence
  Synthetic
gagcggggguuu

SEQ ID NO: 10020 - RNA, 12 nt, Artificial Sequence
  Synthetic
ggagcggggguu

SEQ ID NO: 10021 - RNA, 12 nt, Artificial Sequence
  Synthetic
uggagcgggggu

SEQ ID NO: 10022 - RNA, 12 nt, Artificial Sequence
  Synthetic
cuggagcggggg

SEQ ID NO: 10023 - RNA, 12 nt, Artificial Sequence
  Synthetic
ucuggagcgggg

SEQ ID NO: 10024 - RNA, 12 nt, Artificial Sequence
  Synthetic
aucuggagcggg

SEQ ID NO: 10025 - RNA, 12 nt, Artificial Sequence
  Synthetic
gaucuggagcgg

SEQ ID NO: 10026 - RNA, 12 nt, Artificial Sequence
  Synthetic
agaucuggagcg

SEQ ID NO: 10027 - RNA, 12 nt, Artificial Sequence
  Synthetic
cagaucuggagc

SEQ ID NO: 10028 - RNA, 12 nt, Artificial Sequence
  Synthetic
gcagaucuggag

SEQ ID NO: 10029 - RNA, 12 nt, Artificial Sequence
  Synthetic
ugcagaucugga

SEQ ID NO: 10030 - RNA, 12 nt, Artificial Sequence
  Synthetic
gugcagaucugg

SEQ ID NO: 10031 - RNA, 12 nt, Artificial Sequence
  Synthetic
agugcagaucug

SEQ ID NO: 10032 - RNA, 12 nt, Artificial Sequence
  Synthetic
cagugcagaucu

SEQ ID NO: 10033 - RNA, 12 nt, Artificial Sequence
  Synthetic
ccagugcagauc

SEQ ID NO: 10034 - RNA, 12 nt, Artificial Sequence
  Synthetic
cccagugcagau

SEQ ID NO: 10035 - RNA, 12 nt, Artificial Sequence
  Synthetic
acccagugcaga

SEQ ID NO: 10036 - RNA, 12 nt, Artificial Sequence
  Synthetic
cacccagugcag

SEQ ID NO: 10037 - RNA, 12 nt, Artificial Sequence
  Synthetic
acacccagugca

SEQ ID NO: 10038 - RNA, 12 nt, Artificial Sequence
  Synthetic
cacacccagugc

SEQ ID NO: 10039 - RNA, 12 nt, Artificial Sequence
  Synthetic
ccacacccagug

SEQ ID NO: 10040 - RNA, 12 nt, Artificial Sequence
  Synthetic
gccacacccagu

SEQ ID NO: 10041 - RNA, 12 nt, Artificial Sequence
  Synthetic
ggccacacccag

SEQ ID NO: 10042 - RNA, 12 nt, Artificial Sequence
  Synthetic
gggccacaccca

SEQ ID NO: 10043 - RNA, 12 nt, Artificial Sequence
  Synthetic
ggggccacaccc

SEQ ID NO: 10044 - RNA, 12 nt, Artificial Sequence
  Synthetic
cggggccacacc

SEQ ID NO: 10045 - RNA, 12 nt, Artificial Sequence
  Synthetic
gcggggccacac

SEQ ID NO: 10046 - RNA, 12 nt, Artificial Sequence
  Synthetic
ugcggggccaca

SEQ ID NO: 10047 - RNA, 12 nt, Artificial Sequence
  Synthetic
cugcggggccac

SEQ ID NO: 10048 - RNA, 12 nt, Artificial Sequence
  Synthetic
acugcggggcca

SEQ ID NO: 10049 - RNA, 12 nt, Artificial Sequence
  Synthetic
cacugcggggcc

SEQ ID NO: 10050 - RNA, 12 nt, Artificial Sequence
  Synthetic
gcacugcggggc

SEQ ID NO: 10051 - RNA, 12 nt, Artificial Sequence
  Synthetic
ggcacugcgggg

SEQ ID NO: 10052 - RNA, 12 nt, Artificial Sequence
  Synthetic
gggcacugcggg

SEQ ID NO: 10053 - RNA, 12 nt, Artificial Sequence
  Synthetic
ggggcacugcgg

SEQ ID NO: 10054 - RNA, 12 nt, Artificial Sequence
  Synthetic
gggggcacugcg

SEQ ID NO: 10055 - RNA, 12 nt, Artificial Sequence
  Synthetic
ugggggcacugc

SEQ ID NO: 10056 - RNA, 12 nt, Artificial Sequence
  Synthetic
gugggggcacug

SEQ ID NO: 10057 - RNA, 12 nt, Artificial Sequence
  Synthetic
ggugggggcacu

SEQ ID NO: 10058 - RNA, 12 nt, Artificial Sequence
  Synthetic
gggugggggcac

SEQ ID NO: 10059 - RNA, 12 nt, Artificial Sequence
  Synthetic
ugggugggggca

SEQ ID NO: 10060 - RNA, 12 nt, Artificial Sequence
  Synthetic
cugggugggggc

SEQ ID NO: 10061 - RNA, 12 nt, Artificial Sequence
  Synthetic
acuggguggggg

SEQ ID NO: 10062 - RNA, 12 nt, Artificial Sequence
  Synthetic
gacugggugggg

SEQ ID NO: 10063 - RNA, 12 nt, Artificial Sequence
  Synthetic
ggacuggguggg

SEQ ID NO: 10064 - RNA, 12 nt, Artificial Sequence
  Synthetic
cggacugggugg

SEQ ID NO: 10065 - RNA, 12 nt, Artificial Sequence
  Synthetic
gcggacugggug

SEQ ID NO: 10066 - RNA, 12 nt, Artificial Sequence
  Synthetic
ggcggacugggu

SEQ ID NO: 10067 - RNA, 12 nt, Artificial Sequence
  Synthetic
uggcggacuggg

SEQ ID NO: 10068 - RNA, 12 nt, Artificial Sequence
  Synthetic
uuggcggacugg

SEQ ID NO: 10069 - RNA, 12 nt, Artificial Sequence
  Synthetic
uuuggcggacug

SEQ ID NO: 10070 - RNA, 12 nt, Artificial Sequence
  Synthetic
guuuggcggacu

SEQ ID NO: 10071 - RNA, 12 nt, Artificial Sequence
  Synthetic
uguuuggcggac

SEQ ID NO: 10072 - RNA, 12 nt, Artificial Sequence
  Synthetic
guguuuggcgga

SEQ ID NO: 10073 - RNA, 12 nt, Artificial Sequence
  Synthetic
aguguuuggcgg

SEQ ID NO: 10074 - RNA, 12 nt, Artificial Sequence
  Synthetic
gaguguuuggcg

SEQ ID NO: 10075 - RNA, 12 nt, Artificial Sequence
  Synthetic
ggaguguuuggc

SEQ ID NO: 10076 - RNA, 12 nt, Artificial Sequence
  Synthetic
uggaguguuugg

SEQ ID NO: 10077 - RNA, 12 nt, Artificial Sequence
  Synthetic
guggaguguuug

SEQ ID NO: 10078 - RNA, 12 nt, Artificial Sequence
  Synthetic
gguggaguguuu

SEQ ID NO: 10079 - RNA, 12 nt, Artificial Sequence
  Synthetic
ggguggaguguu

SEQ ID NO: 10080 - RNA, 12 nt, Artificial Sequence
  Synthetic
gggguggagugu

SEQ ID NO: 10081 - RNA, 12 nt, Artificial Sequence
  Synthetic
ggggguggagug

SEQ ID NO: 10082 - RNA, 12 nt, Artificial Sequence
  Synthetic
aggggguggagu

SEQ ID NO: 10083 - RNA, 12 nt, Artificial Sequence
  Synthetic
gaggggguggag

SEQ ID NO: 10084 - RNA, 12 nt, Artificial Sequence
  Synthetic
ggagggggugga

SEQ ID NO: 10085 - RNA, 12 nt, Artificial Sequence
  Synthetic
uggagggggugg

SEQ ID NO: 10086 - RNA, 12 nt, Artificial Sequence
  Synthetic
cuggagggggug

SEQ ID NO: 10087 - RNA, 12 nt, Artificial Sequence
  Synthetic
gcuggagggggu

SEQ ID NO: 10088 - RNA, 12 nt, Artificial Sequence
  Synthetic
agcuggaggggg

SEQ ID NO: 10089 - RNA, 12 nt, Artificial Sequence
  Synthetic
gagcuggagggg

SEQ ID NO: 10090 - RNA, 12 nt, Artificial Sequence
  Synthetic
ggagcuggaggg

SEQ ID NO: 10091 - RNA, 12 nt, Artificial Sequence
  Synthetic
uggagcuggagg

SEQ ID NO: 10092 - RNA, 12 nt, Artificial Sequence
  Synthetic
cuggagcuggag

SEQ ID NO: 10093 - RNA, 12 nt, Artificial Sequence
  Synthetic
acuggagcugga

SEQ ID NO: 10094 - RNA, 12 nt, Artificial Sequence
  Synthetic
aacuggagcugg

SEQ ID NO: 10095 - RNA, 12 nt, Artificial Sequence
  Synthetic
aaacuggagcug

SEQ ID NO: 10096 - RNA, 12 nt, Artificial Sequence
  Synthetic
gaaacuggagcu

SEQ ID NO: 10097 - RNA, 12 nt, Artificial Sequence
  Synthetic
ggaaacuggagc

SEQ ID NO: 10098 - RNA, 12 nt, Artificial Sequence
  Synthetic
uggaaacuggag

SEQ ID NO: 10099 - RNA, 12 nt, Artificial Sequence
  Synthetic
uuggaaacugga

SEQ ID NO: 10100 - RNA, 12 nt, Artificial Sequence
  Synthetic
cuuggaaacugg

SEQ ID NO: 10101 - RNA, 12 nt, Artificial Sequence
  Synthetic
acuuggaaacug

SEQ ID NO: 10102 - RNA, 12 nt, Artificial Sequence
  Synthetic
aacuuggaaacu

SEQ ID NO: 10103 - RNA, 12 nt, Artificial Sequence
  Synthetic
gaacuuggaaac

SEQ ID NO: 10104 - RNA, 12 nt, Artificial Sequence
  Synthetic
ggaacuuggaaa

SEQ ID NO: 10105 - RNA, 12 nt, Artificial Sequence
  Synthetic
aggaacuuggaa

SEQ ID NO: 10106 - RNA, 12 nt, Artificial Sequence
  Synthetic
caggaacuugga

SEQ ID NO: 10107 - RNA, 12 nt, Artificial Sequence
  Synthetic
gcaggaacuugg

SEQ ID NO: 10108 - RNA, 12 nt, Artificial Sequence
  Synthetic
ugcaggaacuug

SEQ ID NO: 10109 - RNA, 12 nt, Artificial Sequence
  Synthetic
gugcaggaacuu

SEQ ID NO: 10110 - RNA, 12 nt, Artificial Sequence
  Synthetic
agugcaggaacu

SEQ ID NO: 10111 - RNA, 12 nt, Artificial Sequence
  Synthetic
gagugcaggaac

SEQ ID NO: 10112 - RNA, 12 nt, Artificial Sequence
  Synthetic
ggagugcaggaa

SEQ ID NO: 10113 - RNA, 12 nt, Artificial Sequence
  Synthetic
uggagugcagga

SEQ ID NO: 10114 - RNA, 12 nt, Artificial Sequence
  Synthetic
cuggagugcagg

SEQ ID NO: 10115 - RNA, 12 nt, Artificial Sequence
  Synthetic
ucuggagugcag

SEQ ID NO: 10116 - RNA, 12 nt, Artificial Sequence
  Synthetic
uucuggagugca

SEQ ID NO: 10117 - RNA, 12 nt, Artificial Sequence
  Synthetic
auucuggagugc

SEQ ID NO: 10118 - RNA, 12 nt, Artificial Sequence
  Synthetic
gauucuggagug

SEQ ID NO: 10119 - RNA, 12 nt, Artificial Sequence
  Synthetic
ggauucuggagu

SEQ ID NO: 10120 - RNA, 12 nt, Artificial Sequence
  Synthetic
uggauucuggag

SEQ ID NO: 10121 - RNA, 12 nt, Artificial Sequence
  Synthetic
guggauucugga

SEQ ID NO: 10122 - RNA, 12 nt, Artificial Sequence
  Synthetic
uguggauucugg

SEQ ID NO: 10123 - RNA, 12 nt, Artificial Sequence
  Synthetic
uuguggauucug

SEQ ID NO: 10124 - RNA, 12 nt, Artificial Sequence
  Synthetic
uuuguggauucu

SEQ ID NO: 10125 - RNA, 12 nt, Artificial Sequence
  Synthetic
cuuuguggauuc

SEQ ID NO: 10126 - RNA, 12 nt, Artificial Sequence
  Synthetic
gcuuuguggauu

SEQ ID NO: 10127 - RNA, 12 nt, Artificial Sequence
  Synthetic
ggcuuuguggau

SEQ ID NO: 10128 - RNA, 12 nt, Artificial Sequence
  Synthetic
cggcuuugugga

SEQ ID NO: 10129 - RNA, 12 nt, Artificial Sequence
  Synthetic
acggcuuugugg

SEQ ID NO: 10130 - RNA, 12 nt, Artificial Sequence
  Synthetic
cacggcuuugug

SEQ ID NO: 10131 - RNA, 12 nt, Artificial Sequence
  Synthetic
gcacggcuuugu

SEQ ID NO: 10132 - RNA, 12 nt, Artificial Sequence
  Synthetic
ggcacggcuuug

SEQ ID NO: 10133 - RNA, 12 nt, Artificial Sequence
  Synthetic
aggcacggcuuu

SEQ ID NO: 10134 - RNA, 12 nt, Artificial Sequence
  Synthetic
aaggcacggcuu

SEQ ID NO: 10135 - RNA, 12 nt, Artificial Sequence
  Synthetic
aaaggcacggcu

SEQ ID NO: 10136 - RNA, 12 nt, Artificial Sequence
  Synthetic
gaaaggcacggc

SEQ ID NO: 10137 - RNA, 12 nt, Artificial Sequence
  Synthetic
agaaaggcacgg

SEQ ID NO: 10138 - RNA, 12 nt, Artificial Sequence
  Synthetic
gagaaaggcacg

SEQ ID NO: 10139 - RNA, 12 nt, Artificial Sequence
  Synthetic
agagaaaggcac

SEQ ID NO: 10140 - RNA, 12 nt, Artificial Sequence
  Synthetic
cagagaaaggca

SEQ ID NO: 10141 - RNA, 12 nt, Artificial Sequence
  Synthetic
ccagagaaaggc

SEQ ID NO: 10142 - RNA, 12 nt, Artificial Sequence
  Synthetic
gccagagaaagg

SEQ ID NO: 10143 - RNA, 12 nt, Artificial Sequence
  Synthetic
agccagagaaag

SEQ ID NO: 10144 - RNA, 12 nt, Artificial Sequence
  Synthetic
gagccagagaaa

SEQ ID NO: 10145 - RNA, 12 nt, Artificial Sequence
  Synthetic
ggagccagagaa

SEQ ID NO: 10146 - RNA, 12 nt, Artificial Sequence
  Synthetic
uggagccagaga

SEQ ID NO: 10147 - RNA, 12 nt, Artificial Sequence
  Synthetic
cuggagccagag

SEQ ID NO: 10148 - RNA, 12 nt, Artificial Sequence
  Synthetic
ucuggagccaga

SEQ ID NO: 10149 - RNA, 12 nt, Artificial Sequence
  Synthetic
uucuggagccag

SEQ ID NO: 10150 - RNA, 12 nt, Artificial Sequence
  Synthetic
auucuggagcca

SEQ ID NO: 10151 - RNA, 12 nt, Artificial Sequence
  Synthetic
uauucuggagcc

SEQ ID NO: 10152 - RNA, 12 nt, Artificial Sequence
  Synthetic
auauucuggagc

SEQ ID NO: 10153 - RNA, 12 nt, Artificial Sequence
  Synthetic
cauauucuggag

SEQ ID NO: 10154 - RNA, 12 nt, Artificial Sequence
  Synthetic
gcauauucugga

SEQ ID NO: 10155 - RNA, 12 nt, Artificial Sequence
  Synthetic
ugcauauucugg

SEQ ID NO: 10156 - RNA, 12 nt, Artificial Sequence
  Synthetic
augcauauucug

SEQ ID NO: 10157 - RNA, 12 nt, Artificial Sequence
  Synthetic
uaugcauauucu

SEQ ID NO: 10158 - RNA, 12 nt, Artificial Sequence
  Synthetic
uuaugcauauuc

SEQ ID NO: 10159 - RNA, 12 nt, Artificial Sequence
  Synthetic
auuaugcauauu

SEQ ID NO: 10160 - RNA, 12 nt, Artificial Sequence
  Synthetic
gauuaugcauau

SEQ ID NO: 10161 - RNA, 12 nt, Artificial Sequence
  Synthetic
ugauuaugcaua

SEQ ID NO: 10162 - RNA, 12 nt, Artificial Sequence
  Synthetic
cugauuaugcau

SEQ ID NO: 10163 - RNA, 12 nt, Artificial Sequence
  Synthetic
gcugauuaugca

SEQ ID NO: 10164 - RNA, 12 nt, Artificial Sequence
  Synthetic
cgcugauuaugc

SEQ ID NO: 10165 - RNA, 12 nt, Artificial Sequence
  Synthetic
gcgcugauuaug

SEQ ID NO: 10166 - RNA, 12 nt, Artificial Sequence
  Synthetic
ggcgcugauuau

SEQ ID NO: 10167 - RNA, 12 nt, Artificial Sequence
  Synthetic
gggcgcugauua

SEQ ID NO: 10168 - RNA, 12 nt, Artificial Sequence
  Synthetic
agggcgcugauu

SEQ ID NO: 10169 - RNA, 12 nt, Artificial Sequence
  Synthetic
cagggcgcugau

SEQ ID NO: 10170 - RNA, 12 nt, Artificial Sequence
  Synthetic
ccagggcgcuga

SEQ ID NO: 10171 - RNA, 12 nt, Artificial Sequence
  Synthetic
uccagggcgcug

SEQ ID NO: 10172 - RNA, 12 nt, Artificial Sequence
  Synthetic
cuccagggcgcu

SEQ ID NO: 10173 - RNA, 12 nt, Artificial Sequence
  Synthetic
acuccagggcgc

SEQ ID NO: 10174 - RNA, 12 nt, Artificial Sequence
  Synthetic
gacuccagggcg

SEQ ID NO: 10175 - RNA, 12 nt, Artificial Sequence
  Synthetic
ggacuccagggc

SEQ ID NO: 10176 - RNA, 12 nt, Artificial Sequence
  Synthetic
gggacuccaggg

SEQ ID NO: 10177 - RNA, 12 nt, Artificial Sequence
  Synthetic
ggggacuccagg

SEQ ID NO: 10178 - RNA, 12 nt, Artificial Sequence
  Synthetic
aggggacuccag

SEQ ID NO: 10179 - RNA, 12 nt, Artificial Sequence
  Synthetic
caggggacucca

SEQ ID NO: 10180 - RNA, 12 nt, Artificial Sequence
  Synthetic
ccaggggacucc

SEQ ID NO: 10181 - RNA, 12 nt, Artificial Sequence
  Synthetic
cccaggggacuc

SEQ ID NO: 10182 - RNA, 12 nt, Artificial Sequence
  Synthetic
gcccaggggacu

SEQ ID NO: 10183 - RNA, 12 nt, Artificial Sequence
  Synthetic
ggcccaggggac

SEQ ID NO: 10184 - RNA, 12 nt, Artificial Sequence
  Synthetic
aggcccagggga

SEQ ID NO: 10185 - RNA, 12 nt, Artificial Sequence
  Synthetic
caggcccagggg

SEQ ID NO: 10186 - RNA, 12 nt, Artificial Sequence
  Synthetic
ccaggcccaggg

SEQ ID NO: 10187 - RNA, 12 nt, Artificial Sequence
  Synthetic
uccaggcccagg

SEQ ID NO: 10188 - RNA, 12 nt, Artificial Sequence
  Synthetic
guccaggcccag

SEQ ID NO: 10189 - RNA, 12 nt, Artificial Sequence
  Synthetic
gguccaggccca

SEQ ID NO: 10190 - RNA, 12 nt, Artificial Sequence
  Synthetic
cgguccaggccc

SEQ ID NO: 10191 - RNA, 12 nt, Artificial Sequence
  Synthetic
gcgguccaggcc

SEQ ID NO: 10192 - RNA, 12 nt, Artificial Sequence
  Synthetic
agcgguccaggc

SEQ ID NO: 10193 - RNA, 12 nt, Artificial Sequence
  Synthetic
aagcgguccagg

SEQ ID NO: 10194 - RNA, 12 nt, Artificial Sequence
  Synthetic
gaagcgguccag

SEQ ID NO: 10195 - RNA, 12 nt, Artificial Sequence
  Synthetic
ggaagcggucca

SEQ ID NO: 10196 - RNA, 12 nt, Artificial Sequence
  Synthetic
gggaagcggucc

SEQ ID NO: 10197 - RNA, 12 nt, Artificial Sequence
  Synthetic
ugggaagcgguc

SEQ ID NO: 10198 - RNA, 12 nt, Artificial Sequence
  Synthetic
cugggaagcggu

SEQ ID NO: 10199 - RNA, 12 nt, Artificial Sequence
  Synthetic
ucugggaagcgg

SEQ ID NO: 10200 - RNA, 12 nt, Artificial Sequence
  Synthetic
cucugggaagcg

SEQ ID NO: 10201 - RNA, 12 nt, Artificial Sequence
  Synthetic
ccucugggaagc

SEQ ID NO: 10202 - RNA, 12 nt, Artificial Sequence
  Synthetic
gccucugggaag

SEQ ID NO: 10203 - RNA, 12 nt, Artificial Sequence
  Synthetic
ggccucugggaa

SEQ ID NO: 10204 - RNA, 12 nt, Artificial Sequence
  Synthetic
uggccucuggga

SEQ ID NO: 10205 - RNA, 12 nt, Artificial Sequence
  Synthetic
cuggccucuggg

SEQ ID NO: 10206 - RNA, 12 nt, Artificial Sequence
  Synthetic
ccuggccucugg

SEQ ID NO: 10207 - RNA, 12 nt, Artificial Sequence
  Synthetic
uccuggccucug

SEQ ID NO: 10208 - RNA, 12 nt, Artificial Sequence
  Synthetic
uuccuggccucu

SEQ ID NO: 10209 - RNA, 12 nt, Artificial Sequence
  Synthetic
auuccuggccuc

SEQ ID NO: 10210 - RNA, 12 nt, Artificial Sequence
  Synthetic
gauuccuggccu

SEQ ID NO: 10211 - RNA, 12 nt, Artificial Sequence
  Synthetic
agauuccuggcc

SEQ ID NO: 10212 - RNA, 12 nt, Artificial Sequence
  Synthetic
cagauuccuggc

SEQ ID NO: 10213 - RNA, 12 nt, Artificial Sequence
  Synthetic
gcagauuccugg

SEQ ID NO: 10214 - RNA, 12 nt, Artificial Sequence
  Synthetic
ggcagauuccug

SEQ ID NO: 10215 - RNA, 12 nt, Artificial Sequence
  Synthetic
uggcagauuccu

SEQ ID NO: 10216 - RNA, 12 nt, Artificial Sequence
  Synthetic
auggcagauucc

SEQ ID NO: 10217 - RNA, 12 nt, Artificial Sequence
  Synthetic
aauggcagauuc

SEQ ID NO: 10218 - RNA, 12 nt, Artificial Sequence
  Synthetic
uaauggcagauu

SEQ ID NO: 10219 - RNA, 12 nt, Artificial Sequence
  Synthetic
guaauggcagau

SEQ ID NO: 10220 - RNA, 12 nt, Artificial Sequence
  Synthetic
aguaauggcaga

SEQ ID NO: 10221 - RNA, 12 nt, Artificial Sequence
  Synthetic
gaguaauggcag

SEQ ID NO: 10222 - RNA, 12 nt, Artificial Sequence
  Synthetic
agaguaauggca

SEQ ID NO: 10223 - RNA, 12 nt, Artificial Sequence
  Synthetic
cagaguaauggc

SEQ ID NO: 10224 - RNA, 12 nt, Artificial Sequence
  Synthetic
gcagaguaaugg

SEQ ID NO: 10225 - RNA, 12 nt, Artificial Sequence
  Synthetic
cgcagaguaaug

SEQ ID NO: 10226 - RNA, 12 nt, Artificial Sequence
  Synthetic
ccgcagaguaau

SEQ ID NO: 10227 - RNA, 12 nt, Artificial Sequence
  Synthetic
accgcagaguaa

SEQ ID NO: 10228 - RNA, 12 nt, Artificial Sequence
  Synthetic
caccgcagagua

SEQ ID NO: 10229 - RNA, 12 nt, Artificial Sequence
  Synthetic
ccaccgcagagu

SEQ ID NO: 10230 - RNA, 12 nt, Artificial Sequence
  Synthetic
accaccgcagag

SEQ ID NO: 10231 - RNA, 12 nt, Artificial Sequence
  Synthetic
caccaccgcaga

SEQ ID NO: 10232 - RNA, 12 nt, Artificial Sequence
  Synthetic
gcaccaccgcag

SEQ ID NO: 10233 - RNA, 12 nt, Artificial Sequence
  Synthetic
ggcaccaccgca

SEQ ID NO: 10234 - RNA, 12 nt, Artificial Sequence
  Synthetic
uggcaccaccgc

SEQ ID NO: 10235 - RNA, 12 nt, Artificial Sequence
  Synthetic
cuggcaccaccg

SEQ ID NO: 10236 - RNA, 12 nt, Artificial Sequence
  Synthetic
ucuggcaccacc

SEQ ID NO: 10237 - RNA, 12 nt, Artificial Sequence
  Synthetic
cucuggcaccac

SEQ ID NO: 10238 - RNA, 12 nt, Artificial Sequence
  Synthetic
ccucuggcacca

SEQ ID NO: 10239 - RNA, 12 nt, Artificial Sequence
  Synthetic
accucuggcacc

SEQ ID NO: 10240 - RNA, 12 nt, Artificial Sequence
  Synthetic
aaccucuggcac

SEQ ID NO: 10241 - RNA, 12 nt, Artificial Sequence
  Synthetic
aaaccucuggca

SEQ ID NO: 10242 - RNA, 12 nt, Artificial Sequence
  Synthetic
aaaaccucuggc

SEQ ID NO: 10243 - RNA, 12 nt, Artificial Sequence
  Synthetic
uaaaaccucugg

SEQ ID NO: 10244 - RNA, 12 nt, Artificial Sequence
  Synthetic
cuaaaaccucug

SEQ ID NO: 10245 - RNA, 12 nt, Artificial Sequence
  Synthetic
ccuaaaaccucu

SEQ ID NO: 10246 - RNA, 12 nt, Artificial Sequence
  Synthetic
uccuaaaaccuc

SEQ ID NO: 10247 - RNA, 12 nt, Artificial Sequence
  Synthetic
uuccuaaaaccu

SEQ ID NO: 10248 - RNA, 12 nt, Artificial Sequence
  Synthetic
uuuccuaaaacc

SEQ ID NO: 10249 - RNA, 12 nt, Artificial Sequence
  Synthetic
guuuccuaaaac

SEQ ID NO: 10250 - RNA, 12 nt, Artificial Sequence
  Synthetic
gguuuccuaaaa

SEQ ID NO: 10251 - RNA, 12 nt, Artificial Sequence
  Synthetic
agguuuccuaaa

SEQ ID NO: 10252 - RNA, 12 nt, Artificial Sequence
  Synthetic
cagguuuccuaa

SEQ ID NO: 10253 - RNA, 12 nt, Artificial Sequence
  Synthetic
ccagguuuccua

SEQ ID NO: 10254 - RNA, 12 nt, Artificial Sequence
  Synthetic
gccagguuuccu

SEQ ID NO: 10255 - RNA, 12 nt, Artificial Sequence
  Synthetic
ugccagguuucc

SEQ ID NO: 10256 - RNA, 12 nt, Artificial Sequence
  Synthetic
augccagguuuc

SEQ ID NO: 10257 - RNA, 12 nt, Artificial Sequence
  Synthetic
caugccagguuu

SEQ ID NO: 10258 - RNA, 12 nt, Artificial Sequence
  Synthetic
ccaugccagguu

SEQ ID NO: 10259 - RNA, 12 nt, Artificial Sequence
  Synthetic
accaugccaggu

SEQ ID NO: 10260 - RNA, 12 nt, Artificial Sequence
  Synthetic
caccaugccagg

SEQ ID NO: 10261 - RNA, 12 nt, Artificial Sequence
  Synthetic
gcaccaugccag

SEQ ID NO: 10262 - RNA, 12 nt, Artificial Sequence
  Synthetic
agcaccaugcca

SEQ ID NO: 10263 - RNA, 12 nt, Artificial Sequence
  Synthetic
aagcaccaugcc

SEQ ID NO: 10264 - RNA, 12 nt, Artificial Sequence
  Synthetic
aaagcaccaugc

SEQ ID NO: 10265 - RNA, 12 nt, Artificial Sequence
  Synthetic
gaaagcaccaug

SEQ ID NO: 10266 - RNA, 12 nt, Artificial Sequence
  Synthetic
ugaaagcaccau

SEQ ID NO: 10267 - RNA, 12 nt, Artificial Sequence
  Synthetic
cugaaagcacca

SEQ ID NO: 10268 - RNA, 12 nt, Artificial Sequence
  Synthetic
ccugaaagcacc

SEQ ID NO: 10269 - RNA, 12 nt, Artificial Sequence
  Synthetic
accugaaagcac

SEQ ID NO: 10270 - RNA, 12 nt, Artificial Sequence
  Synthetic
gaccugaaagca

SEQ ID NO: 10271 - RNA, 12 nt, Artificial Sequence
  Synthetic
agaccugaaagc

SEQ ID NO: 10272 - RNA, 12 nt, Artificial Sequence
  Synthetic
cagaccugaaag

SEQ ID NO: 10273 - RNA, 12 nt, Artificial Sequence
  Synthetic
ccagaccugaaa

SEQ ID NO: 10274 - RNA, 12 nt, Artificial Sequence
  Synthetic
cccagaccugaa

SEQ ID NO: 10275 - RNA, 12 nt, Artificial Sequence
  Synthetic
ccccagaccuga

SEQ ID NO: 10276 - RNA, 12 nt, Artificial Sequence
  Synthetic
gccccagaccug

SEQ ID NO: 10277 - RNA, 12 nt, Artificial Sequence
  Synthetic
agccccagaccu

SEQ ID NO: 10278 - RNA, 12 nt, Artificial Sequence
  Synthetic
aagccccagacc

SEQ ID NO: 10279 - RNA, 12 nt, Artificial Sequence
  Synthetic
aaagccccagac

SEQ ID NO: 10280 - RNA, 12 nt, Artificial Sequence
  Synthetic
aaaagccccaga

SEQ ID NO: 10281 - RNA, 12 nt, Artificial Sequence
  Synthetic
uaaaagccccag

SEQ ID NO: 10282 - RNA, 12 nt, Artificial Sequence
  Synthetic
cuaaaagcccca

SEQ ID NO: 10283 - RNA, 12 nt, Artificial Sequence
  Synthetic
ucuaaaagcccc

SEQ ID NO: 10284 - RNA, 12 nt, Artificial Sequence
  Synthetic
cucuaaaagccc

SEQ ID NO: 10285 - RNA, 12 nt, Artificial Sequence
  Synthetic
gcucuaaaagcc

SEQ ID NO: 10286 - RNA, 12 nt, Artificial Sequence
  Synthetic
ggcucuaaaagc

SEQ ID NO: 10287 - RNA, 12 nt, Artificial Sequence
  Synthetic
gggcucuaaaag

SEQ ID NO: 10288 - RNA, 12 nt, Artificial Sequence
  Synthetic
ggggcucuaaaa

SEQ ID NO: 10289 - RNA, 12 nt, Artificial Sequence
  Synthetic
gggggcucuaaa

SEQ ID NO: 10290 - RNA, 12 nt, Artificial Sequence
  Synthetic
ggggggcucuaa

SEQ ID NO: 10291 - RNA, 12 nt, Artificial Sequence
  Synthetic
cggggggcucua

SEQ ID NO: 10292 - RNA, 12 nt, Artificial Sequence
  Synthetic
acggggggcucu

SEQ ID NO: 10293 - RNA, 12 nt, Artificial Sequence
  Synthetic
cacggggggcuc

SEQ ID NO: 10294 - RNA, 12 nt, Artificial Sequence
  Synthetic
acacggggggcu

SEQ ID NO: 10295 - RNA, 12 nt, Artificial Sequence
  Synthetic
cacacggggggc

SEQ ID NO: 10296 - RNA, 12 nt, Artificial Sequence
  Synthetic
ccacacgggggg

SEQ ID NO: 10297 - RNA, 12 nt, Artificial Sequence
  Synthetic
gccacacggggg

SEQ ID NO: 10298 - RNA, 12 nt, Artificial Sequence
  Synthetic
agccacacgggg

SEQ ID NO: 10299 - RNA, 12 nt, Artificial Sequence
  Synthetic
aagccacacggg

SEQ ID NO: 10300 - RNA, 12 nt, Artificial Sequence
  Synthetic
uaagccacacgg

SEQ ID NO: 10301 - RNA, 12 nt, Artificial Sequence
  Synthetic
guaagccacacg

SEQ ID NO: 10302 - RNA, 12 nt, Artificial Sequence
  Synthetic
uguaagccacac

SEQ ID NO: 10303 - RNA, 12 nt, Artificial Sequence
  Synthetic
uuguaagccaca

SEQ ID NO: 10304 - RNA, 12 nt, Artificial Sequence
  Synthetic
uuuguaagccac

SEQ ID NO: 10305 - RNA, 12 nt, Artificial Sequence
  Synthetic
auuuguaagcca

SEQ ID NO: 10306 - RNA, 12 nt, Artificial Sequence
  Synthetic
aauuuguaagcc

SEQ ID NO: 10307 - RNA, 12 nt, Artificial Sequence
  Synthetic
gaauuuguaagc

SEQ ID NO: 10308 - RNA, 12 nt, Artificial Sequence
  Synthetic
agaauuuguaag

SEQ ID NO: 10309 - RNA, 12 nt, Artificial Sequence
  Synthetic
uagaauuuguaa

SEQ ID NO: 10310 - RNA, 12 nt, Artificial Sequence
  Synthetic
guagaauuugua

SEQ ID NO: 10311 - RNA, 12 nt, Artificial Sequence
  Synthetic
uguagaauuugu

SEQ ID NO: 10312 - RNA, 12 nt, Artificial Sequence
  Synthetic
cuguagaauuug

SEQ ID NO: 10313 - RNA, 12 nt, Artificial Sequence
  Synthetic
gcuguagaauuu

SEQ ID NO: 10314 - RNA, 12 nt, Artificial Sequence
  Synthetic
ugcuguagaauu

SEQ ID NO: 10315 - RNA, 12 nt, Artificial Sequence
  Synthetic
augcuguagaau

SEQ ID NO: 10316 - RNA, 12 nt, Artificial Sequence
  Synthetic
uaugcuguagaa

SEQ ID NO: 10317 - RNA, 12 nt, Artificial Sequence
  Synthetic
guaugcuguaga

SEQ ID NO: 10318 - RNA, 12 nt, Artificial Sequence
  Synthetic
uguaugcuguag

SEQ ID NO: 10319 - RNA, 12 nt, Artificial Sequence
  Synthetic
cuguaugcugua

SEQ ID NO: 10320 - RNA, 12 nt, Artificial Sequence
  Synthetic
ucuguaugcugu

SEQ ID NO: 10321 - RNA, 12 nt, Artificial Sequence
  Synthetic
cucuguaugcug

SEQ ID NO: 10322 - RNA, 12 nt, Artificial Sequence
  Synthetic
gcucuguaugcu

SEQ ID NO: 10323 - RNA, 12 nt, Artificial Sequence
  Synthetic
ugcucuguaugc

SEQ ID NO: 10324 - RNA, 12 nt, Artificial Sequence
  Synthetic
cugcucuguaug

SEQ ID NO: 10325 - RNA, 12 nt, Artificial Sequence
  Synthetic
ccugcucuguau

SEQ ID NO: 10326 - RNA, 12 nt, Artificial Sequence
  Synthetic
gccugcucugua

SEQ ID NO: 10327 - RNA, 12 nt, Artificial Sequence
  Synthetic
ggccugcucugu

SEQ ID NO: 10328 - RNA, 12 nt, Artificial Sequence
  Synthetic
uggccugcucug

SEQ ID NO: 10329 - RNA, 12 nt, Artificial Sequence
  Synthetic
guggccugcucu

SEQ ID NO: 10330 - RNA, 12 nt, Artificial Sequence
  Synthetic
cguggccugcuc

SEQ ID NO: 10331 - RNA, 12 nt, Artificial Sequence
  Synthetic
gcguggccugcu

SEQ ID NO: 10332 - RNA, 12 nt, Artificial Sequence
  Synthetic
agcguggccugc

SEQ ID NO: 10333 - RNA, 12 nt, Artificial Sequence
  Synthetic
gagcguggccug

SEQ ID NO: 10334 - RNA, 12 nt, Artificial Sequence
  Synthetic
ugagcguggccu

SEQ ID NO: 10335 - RNA, 12 nt, Artificial Sequence
  Synthetic
cugagcguggcc

SEQ ID NO: 10336 - RNA, 12 nt, Artificial Sequence
  Synthetic
ccugagcguggc

SEQ ID NO: 10337 - RNA, 12 nt, Artificial Sequence
  Synthetic
gccugagcgugg

SEQ ID NO: 10338 - RNA, 12 nt, Artificial Sequence
  Synthetic
ggccugagcgug

SEQ ID NO: 10339 - RNA, 12 nt, Artificial Sequence
  Synthetic
gggccugagcgu

SEQ ID NO: 10340 - RNA, 12 nt, Artificial Sequence
  Synthetic
cgggccugagcg

SEQ ID NO: 10341 - RNA, 12 nt, Artificial Sequence
  Synthetic
ccgggccugagc

SEQ ID NO: 10342 - RNA, 12 nt, Artificial Sequence
  Synthetic
gccgggccugag

SEQ ID NO: 10343 - RNA, 12 nt, Artificial Sequence
  Synthetic
ugccgggccuga

SEQ ID NO: 10344 - RNA, 12 nt, Artificial Sequence
  Synthetic
augccgggccug

SEQ ID NO: 10345 - RNA, 12 nt, Artificial Sequence
  Synthetic
caugccgggccu

SEQ ID NO: 10346 - RNA, 12 nt, Artificial Sequence
  Synthetic
gcaugccgggcc

SEQ ID NO: 10347 - RNA, 12 nt, Artificial Sequence
  Synthetic
cgcaugccgggc

SEQ ID NO: 10348 - RNA, 12 nt, Artificial Sequence
  Synthetic
ccgcaugccggg

SEQ ID NO: 10349 - RNA, 12 nt, Artificial Sequence
  Synthetic
cccgcaugccgg

SEQ ID NO: 10350 - RNA, 12 nt, Artificial Sequence
  Synthetic
gcccgcaugccg

SEQ ID NO: 10351 - RNA, 12 nt, Artificial Sequence
  Synthetic
ggcccgcaugcc

SEQ ID NO: 10352 - RNA, 12 nt, Artificial Sequence
  Synthetic
uggcccgcaugc

SEQ ID NO: 10353 - RNA, 12 nt, Artificial Sequence
  Synthetic
guggcccgcaug

SEQ ID NO: 10354 - RNA, 12 nt, Artificial Sequence
  Synthetic
gguggcccgcau

SEQ ID NO: 10355 - RNA, 12 nt, Artificial Sequence
  Synthetic
ugguggcccgca

SEQ ID NO: 10356 - RNA, 12 nt, Artificial Sequence
  Synthetic
uugguggcccgc

SEQ ID NO: 10357 - RNA, 12 nt, Artificial Sequence
  Synthetic
cuugguggcccg

SEQ ID NO: 10358 - RNA, 12 nt, Artificial Sequence
  Synthetic
acuugguggccc

SEQ ID NO: 10359 - RNA, 12 nt, Artificial Sequence
  Synthetic
aacuugguggcc

SEQ ID NO: 10360 - RNA, 12 nt, Artificial Sequence
  Synthetic
gaacuugguggc

SEQ ID NO: 10361 - RNA, 12 nt, Artificial Sequence
  Synthetic
agaacuuggugg

SEQ ID NO: 10362 - RNA, 12 nt, Artificial Sequence
  Synthetic
cagaacuuggug

SEQ ID NO: 10363 - RNA, 12 nt, Artificial Sequence
  Synthetic
ccagaacuuggu

SEQ ID NO: 10364 - RNA, 12 nt, Artificial Sequence
  Synthetic
uccagaacuugg

SEQ ID NO: 10365 - RNA, 12 nt, Artificial Sequence
  Synthetic
uuccagaacuug

SEQ ID NO: 10366 - RNA, 12 nt, Artificial Sequence
  Synthetic
uuuccagaacuu

SEQ ID NO: 10367 - RNA, 12 nt, Artificial Sequence
  Synthetic
guuuccagaacu

SEQ ID NO: 10368 - RNA, 12 nt, Artificial Sequence
  Synthetic
gguuuccagaac

SEQ ID NO: 10369 - RNA, 12 nt, Artificial Sequence
  Synthetic
ugguuuccagaa

SEQ ID NO: 10370 - RNA, 12 nt, Artificial Sequence
  Synthetic
gugguuuccaga

SEQ ID NO: 10371 - RNA, 12 nt, Artificial Sequence
  Synthetic
cgugguuuccag

SEQ ID NO: 10372 - RNA, 12 nt, Artificial Sequence
  Synthetic
acgugguuucca

SEQ ID NO: 10373 - RNA, 12 nt, Artificial Sequence
  Synthetic
cacgugguuucc

SEQ ID NO: 10374 - RNA, 12 nt, Artificial Sequence
  Synthetic
ccacgugguuuc

SEQ ID NO: 10375 - RNA, 12 nt, Artificial Sequence
  Synthetic
accacgugguuu

SEQ ID NO: 10376 - RNA, 12 nt, Artificial Sequence
  Synthetic
caccacgugguu

SEQ ID NO: 10377 - RNA, 12 nt, Artificial Sequence
  Synthetic
acaccacguggu

SEQ ID NO: 10378 - RNA, 12 nt, Artificial Sequence
  Synthetic
gacaccacgugg

SEQ ID NO: 10379 - RNA, 12 nt, Artificial Sequence
  Synthetic
ggacaccacgug

SEQ ID NO: 10380 - RNA, 12 nt, Artificial Sequence
  Synthetic
gggacaccacgu

SEQ ID NO: 10381 - RNA, 12 nt, Artificial Sequence
  Synthetic
agggacaccacg

SEQ ID NO: 10382 - RNA, 12 nt, Artificial Sequence
  Synthetic
cagggacaccac

SEQ ID NO: 10383 - RNA, 12 nt, Artificial Sequence
  Synthetic
gcagggacacca

SEQ ID NO: 10384 - RNA, 12 nt, Artificial Sequence
  Synthetic
cgcagggacacc

SEQ ID NO: 10385 - RNA, 12 nt, Artificial Sequence
  Synthetic
ucgcagggacac

SEQ ID NO: 10386 - RNA, 12 nt, Artificial Sequence
  Synthetic
uucgcagggaca

SEQ ID NO: 10387 - RNA, 12 nt, Artificial Sequence
  Synthetic
auucgcagggac

SEQ ID NO: 10388 - RNA, 12 nt, Artificial Sequence
  Synthetic
cauucgcaggga

SEQ ID NO: 10389 - RNA, 12 nt, Artificial Sequence
  Synthetic
ccauucgcaggg

SEQ ID NO: 10390 - RNA, 12 nt, Artificial Sequence
  Synthetic
cccauucgcagg

SEQ ID NO: 10391 - RNA, 12 nt, Artificial Sequence
  Synthetic
ccccauucgcag

SEQ ID NO: 10392 - RNA, 12 nt, Artificial Sequence
  Synthetic
gccccauucgca

SEQ ID NO: 10393 - RNA, 12 nt, Artificial Sequence
  Synthetic
cgccccauucgc

SEQ ID NO: 10394 - RNA, 12 nt, Artificial Sequence
  Synthetic
aucgccccauuc

SEQ ID NO: 10395 - RNA, 12 nt, Artificial Sequence
  Synthetic
gaucgccccauu

SEQ ID NO: 10396 - RNA, 12 nt, Artificial Sequence
  Synthetic
ugaucgccccau

SEQ ID NO: 10397 - RNA, 12 nt, Artificial Sequence
  Synthetic
uugaucgcccca

SEQ ID NO: 10398 - RNA, 12 nt, Artificial Sequence
  Synthetic
cuugaucgcccc

SEQ ID NO: 10399 - RNA, 12 nt, Artificial Sequence
  Synthetic
acuugaucgccc

SEQ ID NO: 10400 - RNA, 12 nt, Artificial Sequence
  Synthetic
gacuugaucgcc

SEQ ID NO: 10401 - RNA, 12 nt, Artificial Sequence
  Synthetic
ggacuugaucgc

SEQ ID NO: 10402 - RNA, 12 nt, Artificial Sequence
  Synthetic
uggacuugaucg

SEQ ID NO: 10403 - RNA, 12 nt, Artificial Sequence
  Synthetic
cuggacuugauc

SEQ ID NO: 10404 - RNA, 12 nt, Artificial Sequence
  Synthetic
ucuggacuugau

SEQ ID NO: 10405 - RNA, 12 nt, Artificial Sequence
  Synthetic
cucuggacuuga

SEQ ID NO: 10406 - RNA, 12 nt, Artificial Sequence
  Synthetic
gcucuggacuug

SEQ ID NO: 10407 - RNA, 12 nt, Artificial Sequence
  Synthetic
ggcucuggacuu

SEQ ID NO: 10408 - RNA, 12 nt, Artificial Sequence
  Synthetic
cggcucuggacu

SEQ ID NO: 10409 - RNA, 12 nt, Artificial Sequence
  Synthetic
ccggcucuggac

SEQ ID NO: 10410 - RNA, 12 nt, Artificial Sequence
  Synthetic
cccggcucugga

SEQ ID NO: 10411 - RNA, 12 nt, Artificial Sequence
  Synthetic
ccccggcucugg

SEQ ID NO: 10412 - RNA, 12 nt, Artificial Sequence
  Synthetic
gccccggcucug

SEQ ID NO: 10413 - RNA, 12 nt, Artificial Sequence
  Synthetic
ugccccggcucu

SEQ ID NO: 10414 - RNA, 12 nt, Artificial Sequence
  Synthetic
gugccccggcuc

SEQ ID NO: 10415 - RNA, 12 nt, Artificial Sequence
  Synthetic
agugccccggcu

SEQ ID NO: 10416 - RNA, 12 nt, Artificial Sequence
  Synthetic
aagugccccggc

SEQ ID NO: 10417 - RNA, 12 nt, Artificial Sequence
  Synthetic
aaagugccccgg

SEQ ID NO: 10418 - RNA, 12 nt, Artificial Sequence
  Synthetic
gaaagugccccg

SEQ ID NO: 10419 - RNA, 12 nt, Artificial Sequence
  Synthetic
ugaaagugcccc

SEQ ID NO: 10420 - RNA, 12 nt, Artificial Sequence
  Synthetic
cugaaagugccc

SEQ ID NO: 10421 - RNA, 12 nt, Artificial Sequence
  Synthetic
ucugaaagugcc

SEQ ID NO: 10422 - RNA, 12 nt, Artificial Sequence
  Synthetic
cucugaaagugc

SEQ ID NO: 10423 - RNA, 12 nt, Artificial Sequence
  Synthetic
acucugaaagug

SEQ ID NO: 10424 - RNA, 12 nt, Artificial Sequence
  Synthetic
aacucugaaagu

SEQ ID NO: 10425 - RNA, 12 nt, Artificial Sequence
  Synthetic
aaacucugaaag

SEQ ID NO: 10426 - RNA, 12 nt, Artificial Sequence
  Synthetic
caaacucugaaa

SEQ ID NO: 10427 - RNA, 12 nt, Artificial Sequence
  Synthetic
ucaaacucugaa

SEQ ID NO: 10428 - RNA, 12 nt, Artificial Sequence
  Synthetic
uucaaacucuga

SEQ ID NO: 10429 - RNA, 12 nt, Artificial Sequence
  Synthetic
cuucaaacucug

SEQ ID NO: 10430 - RNA, 12 nt, Artificial Sequence
  Synthetic
ccuucaaacucu

SEQ ID NO: 10431 - RNA, 12 nt, Artificial Sequence
  Synthetic
accuucaaacuc

SEQ ID NO: 10432 - RNA, 12 nt, Artificial Sequence
  Synthetic
uaccuucaaacu

SEQ ID NO: 10433 - RNA, 12 nt, Artificial Sequence
  Synthetic
uuaccuucaaac

SEQ ID NO: 10434 - RNA, 12 nt, Artificial Sequence
  Synthetic
guuaccuucaaa

SEQ ID NO: 10435 - RNA, 12 nt, Artificial Sequence
  Synthetic
aguuaccuucaa

SEQ ID NO: 10436 - RNA, 12 nt, Artificial Sequence
  Synthetic
caguuaccuuca

SEQ ID NO: 10437 - RNA, 12 nt, Artificial Sequence
  Synthetic
ucaguuaccuuc

SEQ ID NO: 10438 - RNA, 12 nt, Artificial Sequence
  Synthetic
cucaguuaccuu

SEQ ID NO: 10439 - RNA, 12 nt, Artificial Sequence
  Synthetic
ucucaguuaccu

SEQ ID NO: 10440 - RNA, 12 nt, Artificial Sequence
  Synthetic
cucucaguuacc

SEQ ID NO: 10441 - RNA, 12 nt, Artificial Sequence
  Synthetic
gcucucaguuac

SEQ ID NO: 10442 - RNA, 12 nt, Artificial Sequence
  Synthetic
ugcucucaguua

SEQ ID NO: 10443 - RNA, 12 nt, Artificial Sequence
  Synthetic
cugcucucaguu

SEQ ID NO: 10444 - RNA, 12 nt, Artificial Sequence
  Synthetic
ucugcucucagu

SEQ ID NO: 10445 - RNA, 12 nt, Artificial Sequence
  Synthetic
aucugcucucag

SEQ ID NO: 10446 - RNA, 12 nt, Artificial Sequence
  Synthetic
caucugcucuca

SEQ ID NO: 10447 - RNA, 12 nt, Artificial Sequence
  Synthetic
ccaucugcucuc

SEQ ID NO: 10448 - RNA, 12 nt, Artificial Sequence
  Synthetic
accaucugcucu

SEQ ID NO: 10449 - RNA, 12 nt, Artificial Sequence
  Synthetic
gaccaucugcuc

SEQ ID NO: 10450 - RNA, 12 nt, Artificial Sequence
  Synthetic
ggaccaucugcu

SEQ ID NO: 10451 - RNA, 12 nt, Artificial Sequence
  Synthetic
aggaccaucugc

SEQ ID NO: 10452 - RNA, 12 nt, Artificial Sequence
  Synthetic
gaggaccaucug

SEQ ID NO: 10453 - RNA, 12 nt, Artificial Sequence
  Synthetic
ggaggaccaucu

SEQ ID NO: 10454 - RNA, 12 nt, Artificial Sequence
  Synthetic
uggaggaccauc

SEQ ID NO: 10455 - RNA, 12 nt, Artificial Sequence
  Synthetic
auggaggaccau

SEQ ID NO: 10456 - RNA, 12 nt, Artificial Sequence
  Synthetic
aauggaggacca

SEQ ID NO: 10457 - RNA, 12 nt, Artificial Sequence
  Synthetic
aaauggaggacc

SEQ ID NO: 10458 - RNA, 12 nt, Artificial Sequence
  Synthetic
gaaauggaggac

SEQ ID NO: 10459 - RNA, 12 nt, Artificial Sequence
  Synthetic
ugaaauggagga

SEQ ID NO: 10460 - RNA, 12 nt, Artificial Sequence
  Synthetic
uugaaauggagg

SEQ ID NO: 10461 - RNA, 12 nt, Artificial Sequence
  Synthetic
guugaaauggag

SEQ ID NO: 10462 - RNA, 12 nt, Artificial Sequence
  Synthetic
aguugaaaugga

SEQ ID NO: 10463 - RNA, 12 nt, Artificial Sequence
  Synthetic
gaguugaaaugg

SEQ ID NO: 10464 - RNA, 12 nt, Artificial Sequence
  Synthetic
ggaguugaaaug

SEQ ID NO: 10465 - RNA, 12 nt, Artificial Sequence
  Synthetic
uggaguugaaau

SEQ ID NO: 10466 - RNA, 12 nt, Artificial Sequence
  Synthetic
cuggaguugaaa

SEQ ID NO: 10467 - RNA, 12 nt, Artificial Sequence
  Synthetic
ucuggaguugaa

SEQ ID NO: 10468 - RNA, 12 nt, Artificial Sequence
  Synthetic
uucuggaguuga

SEQ ID NO: 10469 - RNA, 12 nt, Artificial Sequence
  Synthetic
cuucuggaguug

SEQ ID NO: 10470 - RNA, 12 nt, Artificial Sequence
  Synthetic
acuucuggaguu

SEQ ID NO: 10471 - RNA, 12 nt, Artificial Sequence
  Synthetic
cacuucuggagu

SEQ ID NO: 10472 - RNA, 12 nt, Artificial Sequence
  Synthetic
ccacuucuggag

SEQ ID NO: 10473 - RNA, 12 nt, Artificial Sequence
  Synthetic
cccacuucugga

SEQ ID NO: 10474 - RNA, 12 nt, Artificial Sequence
  Synthetic
ccccacuucugg

SEQ ID NO: 10475 - RNA, 12 nt, Artificial Sequence
  Synthetic
gccccacuucug

SEQ ID NO: 10476 - RNA, 12 nt, Artificial Sequence
  Synthetic
agccccacuucu

SEQ ID NO: 10477 - RNA, 12 nt, Artificial Sequence
  Synthetic
gagccccacuuc

SEQ ID NO: 10478 - RNA, 12 nt, Artificial Sequence
  Synthetic
agagccccacuu

SEQ ID NO: 10479 - RNA, 12 nt, Artificial Sequence
  Synthetic
cagagccccacu

SEQ ID NO: 10480 - RNA, 12 nt, Artificial Sequence
  Synthetic
ccagagccccac

SEQ ID NO: 10481 - RNA, 12 nt, Artificial Sequence
  Synthetic
cccagagcccca

SEQ ID NO: 10482 - RNA, 12 nt, Artificial Sequence
  Synthetic
ucccagagcccc

SEQ ID NO: 10483 - RNA, 12 nt, Artificial Sequence
  Synthetic
cucccagagccc

SEQ ID NO: 10484 - RNA, 12 nt, Artificial Sequence
  Synthetic
ccucccagagcc

SEQ ID NO: 10485 - RNA, 12 nt, Artificial Sequence
  Synthetic
cccucccagagc

SEQ ID NO: 10486 - RNA, 12 nt, Artificial Sequence
  Synthetic
ucccucccagag

SEQ ID NO: 10487 - RNA, 12 nt, Artificial Sequence
  Synthetic
aucccucccaga

SEQ ID NO: 10488 - RNA, 12 nt, Artificial Sequence
  Synthetic
caucccucccag

SEQ ID NO: 10489 - RNA, 12 nt, Artificial Sequence
  Synthetic
acaucccuccca

SEQ ID NO: 10490 - RNA, 12 nt, Artificial Sequence
  Synthetic
aacaucccuccc

SEQ ID NO: 10491 - RNA, 12 nt, Artificial Sequence
  Synthetic
gaacaucccucc

SEQ ID NO: 10492 - RNA, 12 nt, Artificial Sequence
  Synthetic
agaacaucccuc

SEQ ID NO: 10493 - RNA, 12 nt, Artificial Sequence
  Synthetic
uagaacaucccu

SEQ ID NO: 10494 - RNA, 12 nt, Artificial Sequence
  Synthetic
cuagaacauccc

SEQ ID NO: 10495 - RNA, 12 nt, Artificial Sequence
  Synthetic
gcuagaacaucc

SEQ ID NO: 10496 - RNA, 12 nt, Artificial Sequence
  Synthetic
ggcuagaacauc

SEQ ID NO: 10497 - RNA, 12 nt, Artificial Sequence
  Synthetic
gggcuagaacau

SEQ ID NO: 10498 - RNA, 12 nt, Artificial Sequence
  Synthetic
agggcuagaaca

SEQ ID NO: 10499 - RNA, 12 nt, Artificial Sequence
  Synthetic
gagggcuagaac

SEQ ID NO: 10500 - RNA, 12 nt, Artificial Sequence
  Synthetic
ggagggcuagaa

SEQ ID NO: 10501 - RNA, 12 nt, Artificial Sequence
  Synthetic
gggagggcuaga

SEQ ID NO: 10502 - RNA, 12 nt, Artificial Sequence
  Synthetic
agggagggcuag

SEQ ID NO: 10503 - RNA, 12 nt, Artificial Sequence
  Synthetic
cagggagggcua

SEQ ID NO: 10504 - RNA, 12 nt, Artificial Sequence
  Synthetic
ccagggagggcu

SEQ ID NO: 10505 - RNA, 12 nt, Artificial Sequence
  Synthetic
gccagggagggc

SEQ ID NO: 10506 - RNA, 12 nt, Artificial Sequence
  Synthetic
ugccagggaggg

SEQ ID NO: 10507 - RNA, 12 nt, Artificial Sequence
  Synthetic
augccagggagg

SEQ ID NO: 10508 - RNA, 12 nt, Artificial Sequence
  Synthetic
caugccagggag

SEQ ID NO: 10509 - RNA, 12 nt, Artificial Sequence
  Synthetic
acaugccaggga

SEQ ID NO: 10510 - RNA, 12 nt, Artificial Sequence
  Synthetic
gacaugccaggg

SEQ ID NO: 10511 - RNA, 12 nt, Artificial Sequence
  Synthetic
ugacaugccagg

SEQ ID NO: 10512 - RNA, 12 nt, Artificial Sequence
  Synthetic
cugacaugccag

SEQ ID NO: 10513 - RNA, 12 nt, Artificial Sequence
  Synthetic
ucugacaugcca

SEQ ID NO: 10514 - RNA, 12 nt, Artificial Sequence
  Synthetic
cucugacaugcc

SEQ ID NO: 10515 - RNA, 12 nt, Artificial Sequence
  Synthetic
gcucugacaugc

SEQ ID NO: 10516 - RNA, 12 nt, Artificial Sequence
  Synthetic
ggcucugacaug

SEQ ID NO: 10517 - RNA, 12 nt, Artificial Sequence
  Synthetic
uggcucugacau

SEQ ID NO: 10518 - RNA, 12 nt, Artificial Sequence
  Synthetic
cuggcucugaca

SEQ ID NO: 10519 - RNA, 12 nt, Artificial Sequence
  Synthetic
ccuggcucugac

SEQ ID NO: 10520 - RNA, 12 nt, Artificial Sequence
  Synthetic
gccuggcucuga

SEQ ID NO: 10521 - RNA, 12 nt, Artificial Sequence
  Synthetic
agccuggcucug

SEQ ID NO: 10522 - RNA, 12 nt, Artificial Sequence
  Synthetic
gagccuggcucu

SEQ ID NO: 10523 - RNA, 12 nt, Artificial Sequence
  Synthetic
agagccuggcuc

SEQ ID NO: 10524 - RNA, 12 nt, Artificial Sequence
  Synthetic
cagagccuggcu

SEQ ID NO: 10525 - RNA, 12 nt, Artificial Sequence
  Synthetic
gcagagccuggc

SEQ ID NO: 10526 - RNA, 12 nt, Artificial Sequence
  Synthetic
ggcagagccugg

SEQ ID NO: 10527 - RNA, 12 nt, Artificial Sequence
  Synthetic
aggcagagccug

SEQ ID NO: 10528 - RNA, 12 nt, Artificial Sequence
  Synthetic
caggcagagccu

SEQ ID NO: 10529 - RNA, 12 nt, Artificial Sequence
  Synthetic
ccaggcagagcc

SEQ ID NO: 10530 - RNA, 12 nt, Artificial Sequence
  Synthetic
uccaggcagagc

SEQ ID NO: 10531 - RNA, 12 nt, Artificial Sequence
  Synthetic
cuccaggcagag

SEQ ID NO: 10532 - RNA, 12 nt, Artificial Sequence
  Synthetic
ccuccaggcaga

SEQ ID NO: 10533 - RNA, 12 nt, Artificial Sequence
  Synthetic
uccuccaggcag

SEQ ID NO: 10534 - RNA, 12 nt, Artificial Sequence
  Synthetic
auccuccaggca

SEQ ID NO: 10535 - RNA, 12 nt, Artificial Sequence
  Synthetic
gauccuccaggc

SEQ ID NO: 10536 - RNA, 12 nt, Artificial Sequence
  Synthetic
ggauccuccagg

SEQ ID NO: 10537 - RNA, 12 nt, Artificial Sequence
  Synthetic
gggauccuccag

SEQ ID NO: 10538 - RNA, 12 nt, Artificial Sequence
  Synthetic
agggauccucca

SEQ ID NO: 10539 - RNA, 12 nt, Artificial Sequence
  Synthetic
gagggauccucc

SEQ ID NO: 10540 - RNA, 12 nt, Artificial Sequence
  Synthetic
ggagggauccuc

SEQ ID NO: 10541 - RNA, 12 nt, Artificial Sequence
  Synthetic
uggagggauccu

SEQ ID NO: 10542 - RNA, 12 nt, Artificial Sequence
  Synthetic
auggagggaucc

SEQ ID NO: 10543 - RNA, 12 nt, Artificial Sequence
  Synthetic
gauggagggauc

SEQ ID NO: 10544 - RNA, 12 nt, Artificial Sequence
  Synthetic
ggauggagggau

SEQ ID NO: 10545 - RNA, 12 nt, Artificial Sequence
  Synthetic
cggauggaggga

SEQ ID NO: 10546 - RNA, 12 nt, Artificial Sequence
  Synthetic
ccggauggaggg

SEQ ID NO: 10547 - RNA, 12 nt, Artificial Sequence
  Synthetic
gccggauggagg

SEQ ID NO: 10548 - RNA, 12 nt, Artificial Sequence
  Synthetic
agccggauggag

SEQ ID NO: 10549 - RNA, 12 nt, Artificial Sequence
  Synthetic
gagccggaugga

SEQ ID NO: 10550 - RNA, 12 nt, Artificial Sequence
  Synthetic
ggagccggaugg

SEQ ID NO: 10551 - RNA, 12 nt, Artificial Sequence
  Synthetic
aggagccggaug

SEQ ID NO: 10552 - RNA, 12 nt, Artificial Sequence
  Synthetic
caggagccggau

SEQ ID NO: 10553 - RNA, 12 nt, Artificial Sequence
  Synthetic
acaggagccgga

SEQ ID NO: 10554 - RNA, 12 nt, Artificial Sequence
  Synthetic
gacaggagccgg

SEQ ID NO: 10555 - RNA, 12 nt, Artificial Sequence
  Synthetic
ugacaggagccg

SEQ ID NO: 10556 - RNA, 12 nt, Artificial Sequence
  Synthetic
augacaggagcc

SEQ ID NO: 10557 - RNA, 12 nt, Artificial Sequence
  Synthetic
gaugacaggagc

SEQ ID NO: 10558 - RNA, 12 nt, Artificial Sequence
  Synthetic
ggaugacaggag

SEQ ID NO: 10559 - RNA, 12 nt, Artificial Sequence
  Synthetic
gggaugacagga

SEQ ID NO: 10560 - RNA, 12 nt, Artificial Sequence
  Synthetic
ggggaugacagg

SEQ ID NO: 10561 - RNA, 12 nt, Artificial Sequence
  Synthetic
aggggaugacag

SEQ ID NO: 10562 - RNA, 12 nt, Artificial Sequence
  Synthetic
uaggggaugaca

SEQ ID NO: 10563 - RNA, 12 nt, Artificial Sequence
  Synthetic
guaggggaugac

SEQ ID NO: 10564 - RNA, 12 nt, Artificial Sequence
  Synthetic
uguaggggauga

SEQ ID NO: 10565 - RNA, 12 nt, Artificial Sequence
  Synthetic
guguaggggaug

SEQ ID NO: 10566 - RNA, 12 nt, Artificial Sequence
  Synthetic
aguguaggggau

SEQ ID NO: 10567 - RNA, 12 nt, Artificial Sequence
  Synthetic
aaguguagggga

SEQ ID NO: 10568 - RNA, 12 nt, Artificial Sequence
  Synthetic
aaaguguagggg

SEQ ID NO: 10569 - RNA, 12 nt, Artificial Sequence
  Synthetic
caaaguguaggg

SEQ ID NO: 10570 - RNA, 12 nt, Artificial Sequence
  Synthetic
ccaaaguguagg

SEQ ID NO: 10571 - RNA, 12 nt, Artificial Sequence
  Synthetic
gccaaaguguag

SEQ ID NO: 10572 - RNA, 12 nt, Artificial Sequence
  Synthetic
ggccaaagugua

SEQ ID NO: 10573 - RNA, 12 nt, Artificial Sequence
  Synthetic
uggccaaagugu

SEQ ID NO: 10574 - RNA, 12 nt, Artificial Sequence
  Synthetic
uuggccaaagug

SEQ ID NO: 10575 - RNA, 12 nt, Artificial Sequence
  Synthetic
cuuggccaaagu

SEQ ID NO: 10576 - RNA, 12 nt, Artificial Sequence
  Synthetic
gcuuggccaaag

SEQ ID NO: 10577 - RNA, 12 nt, Artificial Sequence
  Synthetic
ugcuuggccaaa

SEQ ID NO: 10578 - RNA, 12 nt, Artificial Sequence
  Synthetic
uugcuuggccaa

SEQ ID NO: 10579 - RNA, 12 nt, Artificial Sequence
  Synthetic
cuugcuuggcca

SEQ ID NO: 10580 - RNA, 12 nt, Artificial Sequence
  Synthetic
ucuugcuuggcc

SEQ ID NO: 10581 - RNA, 12 nt, Artificial Sequence
  Synthetic
cucuugcuuggc

SEQ ID NO: 10582 - RNA, 12 nt, Artificial Sequence
  Synthetic
ccucuugcuugg

SEQ ID NO: 10583 - RNA, 12 nt, Artificial Sequence
  Synthetic
accucuugcuug

SEQ ID NO: 10584 - RNA, 12 nt, Artificial Sequence
  Synthetic
caccucuugcuu

SEQ ID NO: 10585 - RNA, 12 nt, Artificial Sequence
  Synthetic
ccaccucuugcu

SEQ ID NO: 10586 - RNA, 12 nt, Artificial Sequence
  Synthetic
accaccucuugc

SEQ ID NO: 10587 - RNA, 12 nt, Artificial Sequence
  Synthetic
uaccaccucuug

SEQ ID NO: 10588 - RNA, 12 nt, Artificial Sequence
  Synthetic
cuaccaccucuu

SEQ ID NO: 10589 - RNA, 12 nt, Artificial Sequence
  Synthetic
ucuaccaccucu

SEQ ID NO: 10590 - RNA, 12 nt, Artificial Sequence
  Synthetic
uucuaccaccuc

SEQ ID NO: 10591 - RNA, 12 nt, Artificial Sequence
  Synthetic
guucuaccaccu

SEQ ID NO: 10592 - RNA, 12 nt, Artificial Sequence
  Synthetic
gguucuaccacc

SEQ ID NO: 10593 - RNA, 12 nt, Artificial Sequence
  Synthetic
ugguucuaccac

SEQ ID NO: 10594 - RNA, 12 nt, Artificial Sequence
  Synthetic
gugguucuacca

SEQ ID NO: 10595 - RNA, 12 nt, Artificial Sequence
  Synthetic
agugguucuacc

SEQ ID NO: 10596 - RNA, 12 nt, Artificial Sequence
  Synthetic
aagugguucuac

SEQ ID NO: 10597 - RNA, 12 nt, Artificial Sequence
  Synthetic
caagugguucua

SEQ ID NO: 10598 - RNA, 12 nt, Artificial Sequence
  Synthetic
ccaagugguucu

SEQ ID NO: 10599 - RNA, 12 nt, Artificial Sequence
  Synthetic
gccaagugguuc

SEQ ID NO: 10600 - RNA, 12 nt, Artificial Sequence
  Synthetic
agccaagugguu

SEQ ID NO: 10601 - RNA, 12 nt, Artificial Sequence
  Synthetic
cagccaaguggu

SEQ ID NO: 10602 - RNA, 12 nt, Artificial Sequence
  Synthetic
gcagccaagugg

SEQ ID NO: 10603 - RNA, 12 nt, Artificial Sequence
  Synthetic
agcagccaagug

SEQ ID NO: 10604 - RNA, 12 nt, Artificial Sequence
  Synthetic
gagcagccaagu

SEQ ID NO: 10605 - RNA, 12 nt, Artificial Sequence
  Synthetic
ugagcagccaag

SEQ ID NO: 10606 - RNA, 12 nt, Artificial Sequence
  Synthetic
augagcagccaa

SEQ ID NO: 10607 - RNA, 12 nt, Artificial Sequence
  Synthetic
aaugagcagcca

SEQ ID NO: 10608 - RNA, 12 nt, Artificial Sequence
  Synthetic
gaaugagcagcc

SEQ ID NO: 10609 - RNA, 12 nt, Artificial Sequence
  Synthetic
ggaaugagcagc

SEQ ID NO: 10610 - RNA, 12 nt, Artificial Sequence
  Synthetic
aggaaugagcag

SEQ ID NO: 10611 - RNA, 12 nt, Artificial Sequence
  Synthetic
aaggaaugagca

SEQ ID NO: 10612 - RNA, 12 nt, Artificial Sequence
  Synthetic
gaaggaaugagc

SEQ ID NO: 10613 - RNA, 12 nt, Artificial Sequence
  Synthetic
agaaggaaugag

SEQ ID NO: 10614 - RNA, 12 nt, Artificial Sequence
  Synthetic
cagaaggaauga

SEQ ID NO: 10615 - RNA, 12 nt, Artificial Sequence
  Synthetic
ccagaaggaaug

SEQ ID NO: 10616 - RNA, 12 nt, Artificial Sequence
  Synthetic
uccagaaggaau

SEQ ID NO: 10617 - RNA, 12 nt, Artificial Sequence
  Synthetic
cuccagaaggaa

SEQ ID NO: 10618 - RNA, 12 nt, Artificial Sequence
  Synthetic
ccuccagaagga

SEQ ID NO: 10619 - RNA, 12 nt, Artificial Sequence
  Synthetic
uccuccagaagg

SEQ ID NO: 10620 - RNA, 12 nt, Artificial Sequence
  Synthetic
guccuccagaag

SEQ ID NO: 10621 - RNA, 12 nt, Artificial Sequence
  Synthetic
uguccuccagaa

SEQ ID NO: 10622 - RNA, 12 nt, Artificial Sequence
  Synthetic
guguccuccaga

SEQ ID NO: 10623 - RNA, 12 nt, Artificial Sequence
  Synthetic
uguguccuccag

SEQ ID NO: 10624 - RNA, 12 nt, Artificial Sequence
  Synthetic
guguguccucca

SEQ ID NO: 10625 - RNA, 12 nt, Artificial Sequence
  Synthetic
uguguguccucc

SEQ ID NO: 10626 - RNA, 12 nt, Artificial Sequence
  Synthetic
cuguguguccuc

SEQ ID NO: 10627 - RNA, 12 nt, Artificial Sequence
  Synthetic
acuguguguccu

SEQ ID NO: 10628 - RNA, 12 nt, Artificial Sequence
  Synthetic
gacugugugucc

SEQ ID NO: 10629 - RNA, 12 nt, Artificial Sequence
  Synthetic
agacuguguguc

SEQ ID NO: 10630 - RNA, 12 nt, Artificial Sequence
  Synthetic
gagacugugugu

SEQ ID NO: 10631 - RNA, 12 nt, Artificial Sequence
  Synthetic
ugagacugugug

SEQ ID NO: 10632 - RNA, 12 nt, Artificial Sequence
  Synthetic
cugagacugugu

SEQ ID NO: 10633 - RNA, 12 nt, Artificial Sequence
  Synthetic
acugagacugug

SEQ ID NO: 10634 - RNA, 12 nt, Artificial Sequence
  Synthetic
gacugagacugu

SEQ ID NO: 10635 - RNA, 12 nt, Artificial Sequence
  Synthetic
ggacugagacug

SEQ ID NO: 10636 - RNA, 12 nt, Artificial Sequence
  Synthetic
uggacugagacu

SEQ ID NO: 10637 - RNA, 12 nt, Artificial Sequence
  Synthetic
cuggacugagac

SEQ ID NO: 10638 - RNA, 12 nt, Artificial Sequence
  Synthetic
ucuggacugaga

SEQ ID NO: 10639 - RNA, 12 nt, Artificial Sequence
  Synthetic
aucuggacugag

SEQ ID NO: 10640 - RNA, 12 nt, Artificial Sequence
  Synthetic
caucuggacuga

SEQ ID NO: 10641 - RNA, 12 nt, Artificial Sequence
  Synthetic
gcaucuggacug

SEQ ID NO: 10642 - RNA, 12 nt, Artificial Sequence
  Synthetic
ggcaucuggacu

SEQ ID NO: 10643 - RNA, 12 nt, Artificial Sequence
  Synthetic
aggcaucuggac

SEQ ID NO: 10644 - RNA, 12 nt, Artificial Sequence
  Synthetic
aaggcaucugga

SEQ ID NO: 10645 - RNA, 12 nt, Artificial Sequence
  Synthetic
gaaggcaucugg

SEQ ID NO: 10646 - RNA, 12 nt, Artificial Sequence
  Synthetic
ggaaggcaucug

SEQ ID NO: 10647 - RNA, 12 nt, Artificial Sequence
  Synthetic
aggaaggcaucu

SEQ ID NO: 10648 - RNA, 12 nt, Artificial Sequence
  Synthetic
caggaaggcauc

SEQ ID NO: 10649 - RNA, 12 nt, Artificial Sequence
  Synthetic
acaggaaggcau

SEQ ID NO: 10650 - RNA, 12 nt, Artificial Sequence
  Synthetic
gacaggaaggca

SEQ ID NO: 10651 - RNA, 12 nt, Artificial Sequence
  Synthetic
agacaggaaggc

SEQ ID NO: 10652 - RNA, 12 nt, Artificial Sequence
  Synthetic
aagacaggaagg

SEQ ID NO: 10653 - RNA, 12 nt, Artificial Sequence
  Synthetic
aaagacaggaag

SEQ ID NO: 10654 - RNA, 12 nt, Artificial Sequence
  Synthetic
gaaagacaggaa

SEQ ID NO: 10655 - RNA, 12 nt, Artificial Sequence
  Synthetic
agaaagacagga

SEQ ID NO: 10656 - RNA, 12 nt, Artificial Sequence
  Synthetic
cagaaagacagg

SEQ ID NO: 10657 - RNA, 12 nt, Artificial Sequence
  Synthetic
ccagaaagacag

SEQ ID NO: 10658 - RNA, 12 nt, Artificial Sequence
  Synthetic
gccagaaagaca

SEQ ID NO: 10659 - RNA, 12 nt, Artificial Sequence
  Synthetic
ggccagaaagac

SEQ ID NO: 10660 - RNA, 12 nt, Artificial Sequence
  Synthetic
gggccagaaaga

SEQ ID NO: 10661 - RNA, 12 nt, Artificial Sequence
  Synthetic
agggccagaaag

SEQ ID NO: 10662 - RNA, 12 nt, Artificial Sequence
  Synthetic
aagggccagaaa

SEQ ID NO: 10663 - RNA, 12 nt, Artificial Sequence
  Synthetic
aaagggccagaa

SEQ ID NO: 10664 - RNA, 12 nt, Artificial Sequence
  Synthetic
gaaagggccaga

SEQ ID NO: 10665 - RNA, 12 nt, Artificial Sequence
  Synthetic
agaaagggccag

SEQ ID NO: 10666 - RNA, 12 nt, Artificial Sequence
  Synthetic
cagaaagggcca

SEQ ID NO: 10667 - RNA, 12 nt, Artificial Sequence
  Synthetic
ccagaaagggcc

SEQ ID NO: 10668 - RNA, 12 nt, Artificial Sequence
  Synthetic
uccagaaagggc

SEQ ID NO: 10669 - RNA, 12 nt, Artificial Sequence
  Synthetic
guccagaaaggg

SEQ ID NO: 10670 - RNA, 12 nt, Artificial Sequence
  Synthetic
gguccagaaagg

SEQ ID NO: 10671 - RNA, 12 nt, Artificial Sequence
  Synthetic
ugguccagaaag

SEQ ID NO: 10672 - RNA, 12 nt, Artificial Sequence
  Synthetic
cugguccagaaa

SEQ ID NO: 10673 - RNA, 12 nt, Artificial Sequence
  Synthetic
ucugguccagaa

SEQ ID NO: 10674 - RNA, 12 nt, Artificial Sequence
  Synthetic
aucugguccaga

SEQ ID NO: 10675 - RNA, 12 nt, Artificial Sequence
  Synthetic
gaucugguccag

SEQ ID NO: 10676 - RNA, 12 nt, Artificial Sequence
  Synthetic
ggaucuggucca

SEQ ID NO: 10677 - RNA, 12 nt, Artificial Sequence
  Synthetic
aggaucuggucc

SEQ ID NO: 10678 - RNA, 12 nt, Artificial Sequence
  Synthetic
uaggaucugguc

SEQ ID NO: 10679 - RNA, 12 nt, Artificial Sequence
  Synthetic
guaggaucuggu

SEQ ID NO: 10680 - RNA, 12 nt, Artificial Sequence
  Synthetic
aguaggaucugg

SEQ ID NO: 10681 - RNA, 12 nt, Artificial Sequence
  Synthetic
gaguaggaucug

SEQ ID NO: 10682 - RNA, 12 nt, Artificial Sequence
  Synthetic
agaguaggaucu

SEQ ID NO: 10683 - RNA, 12 nt, Artificial Sequence
  Synthetic
aagaguaggauc

SEQ ID NO: 10684 - RNA, 12 nt, Artificial Sequence
  Synthetic
gaagaguaggau

SEQ ID NO: 10685 - RNA, 12 nt, Artificial Sequence
  Synthetic
ggaagaguagga

SEQ ID NO: 10686 - RNA, 12 nt, Artificial Sequence
  Synthetic
aggaagaguagg

SEQ ID NO: 10687 - RNA, 12 nt, Artificial Sequence
  Synthetic
aaggaagaguag

SEQ ID NO: 10688 - RNA, 12 nt, Artificial Sequence
  Synthetic
aaaggaagagua

SEQ ID NO: 10689 - RNA, 12 nt, Artificial Sequence
  Synthetic
gaaaggaagagu

SEQ ID NO: 10690 - RNA, 12 nt, Artificial Sequence
  Synthetic
agaaaggaagag

SEQ ID NO: 10691 - RNA, 12 nt, Artificial Sequence
  Synthetic
uagaaaggaaga

SEQ ID NO: 10692 - RNA, 12 nt, Artificial Sequence
  Synthetic
uuagaaaggaag

SEQ ID NO: 10693 - RNA, 12 nt, Artificial Sequence
  Synthetic
uuuagaaaggaa

SEQ ID NO: 10694 - RNA, 12 nt, Artificial Sequence
  Synthetic
auuuagaaagga

SEQ ID NO: 10695 - RNA, 12 nt, Artificial Sequence
  Synthetic
gauuuagaaagg

SEQ ID NO: 10696 - RNA, 12 nt, Artificial Sequence
  Synthetic
agauuuagaaag

SEQ ID NO: 10697 - RNA, 12 nt, Artificial Sequence
  Synthetic
cagauuuagaaa

SEQ ID NO: 10698 - RNA, 12 nt, Artificial Sequence
  Synthetic
ucagauuuagaa

SEQ ID NO: 10699 - RNA, 12 nt, Artificial Sequence
  Synthetic
cucagauuuaga

SEQ ID NO: 10700 - RNA, 12 nt, Artificial Sequence
  Synthetic
ucucagauuuag

SEQ ID NO: 10701 - RNA, 12 nt, Artificial Sequence
  Synthetic
aucucagauuua

SEQ ID NO: 10702 - RNA, 12 nt, Artificial Sequence
  Synthetic
gaucucagauuu

SEQ ID NO: 10703 - RNA, 12 nt, Artificial Sequence
  Synthetic
agaucucagauu

SEQ ID NO: 10704 - RNA, 12 nt, Artificial Sequence
  Synthetic
gagaucucagau

SEQ ID NO: 10705 - RNA, 12 nt, Artificial Sequence
  Synthetic
ggagaucucaga

SEQ ID NO: 10706 - RNA, 12 nt, Artificial Sequence
  Synthetic
gggagaucucag

SEQ ID NO: 10707 - RNA, 12 nt, Artificial Sequence
  Synthetic
agggagaucuca

SEQ ID NO: 10708 - RNA, 12 nt, Artificial Sequence
  Synthetic
gagggagaucuc

SEQ ID NO: 10709 - RNA, 12 nt, Artificial Sequence
  Synthetic
ggagggagaucu

SEQ ID NO: 10710 - RNA, 12 nt, Artificial Sequence
  Synthetic
uggagggagauc

SEQ ID NO: 10711 - RNA, 12 nt, Artificial Sequence
  Synthetic
cuggagggagau

SEQ ID NO: 10712 - RNA, 12 nt, Artificial Sequence
  Synthetic
ccuggagggaga

SEQ ID NO: 10713 - RNA, 12 nt, Artificial Sequence
  Synthetic
cccuggagggag

SEQ ID NO: 10714 - RNA, 12 nt, Artificial Sequence
  Synthetic
ucccuggaggga

SEQ ID NO: 10715 - RNA, 12 nt, Artificial Sequence
  Synthetic
uucccuggaggg

SEQ ID NO: 10716 - RNA, 12 nt, Artificial Sequence
  Synthetic
auucccuggagg

SEQ ID NO: 10717 - RNA, 12 nt, Artificial Sequence
  Synthetic
gauucccuggag

SEQ ID NO: 10718 - RNA, 12 nt, Artificial Sequence
  Synthetic
ggauucccugga

SEQ ID NO: 10719 - RNA, 12 nt, Artificial Sequence
  Synthetic
cggauucccugg

SEQ ID NO: 10720 - RNA, 12 nt, Artificial Sequence
  Synthetic
gcggauucccug

SEQ ID NO: 10721 - RNA, 12 nt, Artificial Sequence
  Synthetic
ggcggauucccu

SEQ ID NO: 10722 - RNA, 12 nt, Artificial Sequence
  Synthetic
aggcggauuccc

SEQ ID NO: 10723 - RNA, 12 nt, Artificial Sequence
  Synthetic
caggcggauucc

SEQ ID NO: 10724 - RNA, 12 nt, Artificial Sequence
  Synthetic
gcaggcggauuc

SEQ ID NO: 10725 - RNA, 12 nt, Artificial Sequence
  Synthetic
ugcaggcggauu

SEQ ID NO: 10726 - RNA, 12 nt, Artificial Sequence
  Synthetic
cugcaggcggau

SEQ ID NO: 10727 - RNA, 12 nt, Artificial Sequence
  Synthetic
ucugcaggcgga

SEQ ID NO: 10728 - RNA, 12 nt, Artificial Sequence
  Synthetic
cucugcaggcgg

SEQ ID NO: 10729 - RNA, 12 nt, Artificial Sequence
  Synthetic
ccucugcaggcg

SEQ ID NO: 10730 - RNA, 12 nt, Artificial Sequence
  Synthetic
uccucugcaggc

SEQ ID NO: 10731 - RNA, 12 nt, Artificial Sequence
  Synthetic
guccucugcagg

SEQ ID NO: 10732 - RNA, 12 nt, Artificial Sequence
  Synthetic
uguccucugcag

SEQ ID NO: 10733 - RNA, 12 nt, Artificial Sequence
  Synthetic
cuguccucugca

SEQ ID NO: 10734 - RNA, 12 nt, Artificial Sequence
  Synthetic
ucuguccucugc

SEQ ID NO: 10735 - RNA, 12 nt, Artificial Sequence
  Synthetic
cucuguccucug

SEQ ID NO: 10736 - RNA, 12 nt, Artificial Sequence
  Synthetic
gcucuguccucu

SEQ ID NO: 10737 - RNA, 12 nt, Artificial Sequence
  Synthetic
agcucuguccuc

SEQ ID NO: 10738 - RNA, 12 nt, Artificial Sequence
  Synthetic
cagcucuguccu

SEQ ID NO: 10739 - RNA, 12 nt, Artificial Sequence
  Synthetic
ccagcucugucc

SEQ ID NO: 10740 - RNA, 12 nt, Artificial Sequence
  Synthetic
gccagcucuguc

SEQ ID NO: 10741 - RNA, 12 nt, Artificial Sequence
  Synthetic
agccagcucugu

SEQ ID NO: 10742 - RNA, 12 nt, Artificial Sequence
  Synthetic
cagccagcucug

SEQ ID NO: 10743 - RNA, 12 nt, Artificial Sequence
  Synthetic
acagccagcucu

SEQ ID NO: 10744 - RNA, 12 nt, Artificial Sequence
  Synthetic
gacagccagcuc

SEQ ID NO: 10745 - RNA, 12 nt, Artificial Sequence
  Synthetic
agacagccagcu

SEQ ID NO: 10746 - RNA, 12 nt, Artificial Sequence
  Synthetic
aagacagccagc

SEQ ID NO: 10747 - RNA, 12 nt, Artificial Sequence
  Synthetic
gaagacagccag

SEQ ID NO: 10748 - RNA, 12 nt, Artificial Sequence
  Synthetic
ggaagacagcca

SEQ ID NO: 10749 - RNA, 12 nt, Artificial Sequence
  Synthetic
gggaagacagcc

SEQ ID NO: 10750 - RNA, 12 nt, Artificial Sequence
  Synthetic
ggggaagacagc

SEQ ID NO: 10751 - RNA, 12 nt, Artificial Sequence
  Synthetic
gggggaagacag

SEQ ID NO: 10752 - RNA, 12 nt, Artificial Sequence
  Synthetic
ugggggaagaca

SEQ ID NO: 10753 - RNA, 12 nt, Artificial Sequence
  Synthetic
gugggggaagac

SEQ ID NO: 10754 - RNA, 12 nt, Artificial Sequence
  Synthetic
ggugggggaaga

SEQ ID NO: 10755 - RNA, 12 nt, Artificial Sequence
  Synthetic
gggugggggaag

SEQ ID NO: 10756 - RNA, 12 nt, Artificial Sequence
  Synthetic
ggggugggggaa

SEQ ID NO: 10757 - RNA, 12 nt, Artificial Sequence
  Synthetic
agggguggggga

SEQ ID NO: 10758 - RNA, 12 nt, Artificial Sequence
  Synthetic
uagggguggggg

SEQ ID NO: 10759 - RNA, 12 nt, Artificial Sequence
  Synthetic
uuaggggugggg

SEQ ID NO: 10760 - RNA, 12 nt, Artificial Sequence
  Synthetic
guuagggguggg

SEQ ID NO: 10761 - RNA, 12 nt, Artificial Sequence
  Synthetic
gguuaggggugg

SEQ ID NO: 10762 - RNA, 12 nt, Artificial Sequence
  Synthetic
agguuaggggug

SEQ ID NO: 10763 - RNA, 12 nt, Artificial Sequence
  Synthetic
cagguuaggggu

SEQ ID NO: 10764 - RNA, 12 nt, Artificial Sequence
  Synthetic
ccagguuagggg

SEQ ID NO: 10765 - RNA, 12 nt, Artificial Sequence
  Synthetic
gccagguuaggg

SEQ ID NO: 10766 - RNA, 12 nt, Artificial Sequence
  Synthetic
agccagguuagg

SEQ ID NO: 10767 - RNA, 12 nt, Artificial Sequence
  Synthetic
aagccagguuag

SEQ ID NO: 10768 - RNA, 12 nt, Artificial Sequence
  Synthetic
uaagccagguua

SEQ ID NO: 10769 - RNA, 12 nt, Artificial Sequence
  Synthetic
auaagccagguu

SEQ ID NO: 10770 - RNA, 12 nt, Artificial Sequence
  Synthetic
aauaagccaggu

SEQ ID NO: 10771 - RNA, 12 nt, Artificial Sequence
  Synthetic
gaauaagccagg

SEQ ID NO: 10772 - RNA, 12 nt, Artificial Sequence
  Synthetic
ggaauaagccag

SEQ ID NO: 10773 - RNA, 12 nt, Artificial Sequence
  Synthetic
gggaauaagcca

SEQ ID NO: 10774 - RNA, 12 nt, Artificial Sequence
  Synthetic
ugggaauaagcc

SEQ ID NO: 10775 - RNA, 12 nt, Artificial Sequence
  Synthetic
uugggaauaagc

SEQ ID NO: 10776 - RNA, 12 nt, Artificial Sequence
  Synthetic
guugggaauaag

SEQ ID NO: 10777 - RNA, 12 nt, Artificial Sequence
  Synthetic
aguugggaauaa

SEQ ID NO: 10778 - RNA, 12 nt, Artificial Sequence
  Synthetic
caguugggaaua

SEQ ID NO: 10779 - RNA, 12 nt, Artificial Sequence
  Synthetic
gcaguugggaau

SEQ ID NO: 10780 - RNA, 12 nt, Artificial Sequence
  Synthetic
agcaguugggaa

SEQ ID NO: 10781 - RNA, 12 nt, Artificial Sequence
  Synthetic
gagcaguuggga

SEQ ID NO: 10782 - RNA, 12 nt, Artificial Sequence
  Synthetic
agagcaguuggg

SEQ ID NO: 10783 - RNA, 12 nt, Artificial Sequence
  Synthetic
cagagcaguugg

SEQ ID NO: 10784 - RNA, 12 nt, Artificial Sequence
  Synthetic
gcagagcaguug

SEQ ID NO: 10785 - RNA, 12 nt, Artificial Sequence
  Synthetic
ggcagagcaguu

SEQ ID NO: 10786 - RNA, 12 nt, Artificial Sequence
  Synthetic
gggcagagcagu

SEQ ID NO: 10787 - RNA, 12 nt, Artificial Sequence
  Synthetic
ugggcagagcag

SEQ ID NO: 10788 - RNA, 12 nt, Artificial Sequence
  Synthetic
gugggcagagca

SEQ ID NO: 10789 - RNA, 12 nt, Artificial Sequence
  Synthetic
agugggcagagc

SEQ ID NO: 10790 - RNA, 12 nt, Artificial Sequence
  Synthetic
cagugggcagag

SEQ ID NO: 10791 - RNA, 12 nt, Artificial Sequence
  Synthetic
acagugggcaga

SEQ ID NO: 10792 - RNA, 12 nt, Artificial Sequence
  Synthetic
cacagugggcag

SEQ ID NO: 10793 - RNA, 12 nt, Artificial Sequence
  Synthetic
ucacagugggca

SEQ ID NO: 10794 - RNA, 12 nt, Artificial Sequence
  Synthetic
uucacagugggc

SEQ ID NO: 10795 - RNA, 12 nt, Artificial Sequence
  Synthetic
uuucacaguggg

SEQ ID NO: 10796 - RNA, 12 nt, Artificial Sequence
  Synthetic
guuucacagugg

SEQ ID NO: 10797 - RNA, 12 nt, Artificial Sequence
  Synthetic
gguuucacagug

SEQ ID NO: 10798 - RNA, 12 nt, Artificial Sequence
  Synthetic
ugguuucacagu

SEQ ID NO: 10799 - RNA, 12 nt, Artificial Sequence
  Synthetic
gugguuucacag

SEQ ID NO: 10800 - RNA, 12 nt, Artificial Sequence
  Synthetic
agugguuucaca

SEQ ID NO: 10801 - RNA, 12 nt, Artificial Sequence
  Synthetic
uagugguuucac

SEQ ID NO: 10802 - RNA, 12 nt, Artificial Sequence
  Synthetic
cuagugguuuca

SEQ ID NO: 10803 - RNA, 12 nt, Artificial Sequence
  Synthetic
ccuagugguuuc

SEQ ID NO: 10804 - RNA, 12 nt, Artificial Sequence
  Synthetic
accuagugguuu

SEQ ID NO: 10805 - RNA, 12 nt, Artificial Sequence
  Synthetic
aaccuagugguu

SEQ ID NO: 10806 - RNA, 12 nt, Artificial Sequence
  Synthetic
gaaccuaguggu

SEQ ID NO: 10807 - RNA, 12 nt, Artificial Sequence
  Synthetic
agaaccuagugg

SEQ ID NO: 10808 - RNA, 12 nt, Artificial Sequence
  Synthetic
uagaaccuagug

SEQ ID NO: 10809 - RNA, 12 nt, Artificial Sequence
  Synthetic
cuagaaccuagu

SEQ ID NO: 10810 - RNA, 12 nt, Artificial Sequence
  Synthetic
ccuagaaccuag

SEQ ID NO: 10811 - RNA, 12 nt, Artificial Sequence
  Synthetic
accuagaaccua

SEQ ID NO: 10812 - RNA, 12 nt, Artificial Sequence
  Synthetic
gaccuagaaccu

SEQ ID NO: 10813 - RNA, 12 nt, Artificial Sequence
  Synthetic
ggaccuagaacc

SEQ ID NO: 10814 - RNA, 12 nt, Artificial Sequence
  Synthetic
aggaccuagaac

SEQ ID NO: 10815 - RNA, 12 nt, Artificial Sequence
  Synthetic
caggaccuagaa

SEQ ID NO: 10816 - RNA, 12 nt, Artificial Sequence
  Synthetic
ccaggaccuaga

SEQ ID NO: 10817 - RNA, 12 nt, Artificial Sequence
  Synthetic
gccaggaccuag

SEQ ID NO: 10818 - RNA, 12 nt, Artificial Sequence
  Synthetic
agccaggaccua

SEQ ID NO: 10819 - RNA, 12 nt, Artificial Sequence
  Synthetic
aagccaggaccu

SEQ ID NO: 10820 - RNA, 12 nt, Artificial Sequence
  Synthetic
gaagccaggacc

SEQ ID NO: 10821 - RNA, 12 nt, Artificial Sequence
  Synthetic
agaagccaggac

SEQ ID NO: 10822 - RNA, 12 nt, Artificial Sequence
  Synthetic
uagaagccagga

SEQ ID NO: 10823 - RNA, 12 nt, Artificial Sequence
  Synthetic
cuagaagccagg

SEQ ID NO: 10824 - RNA, 12 nt, Artificial Sequence
  Synthetic
ucuagaagccag

SEQ ID NO: 10825 - RNA, 12 nt, Artificial Sequence
  Synthetic
aucuagaagcca

SEQ ID NO: 10826 - RNA, 12 nt, Artificial Sequence
  Synthetic
gaucuagaagcc

SEQ ID NO: 10827 - RNA, 12 nt, Artificial Sequence
  Synthetic
agaucuagaagc

SEQ ID NO: 10828 - RNA, 12 nt, Artificial Sequence
  Synthetic
cagaucuagaag

SEQ ID NO: 10829 - RNA, 12 nt, Artificial Sequence
  Synthetic
ccagaucuagaa

SEQ ID NO: 10830 - RNA, 12 nt, Artificial Sequence
  Synthetic
uccagaucuaga

SEQ ID NO: 10831 - RNA, 12 nt, Artificial Sequence
  Synthetic
uuccagaucuag

SEQ ID NO: 10832 - RNA, 12 nt, Artificial Sequence
  Synthetic
guuccagaucua

SEQ ID NO: 10833 - RNA, 12 nt, Artificial Sequence
  Synthetic
gguuccagaucu

SEQ ID NO: 10834 - RNA, 12 nt, Artificial Sequence
  Synthetic
agguuccagauc

SEQ ID NO: 10835 - RNA, 12 nt, Artificial Sequence
  Synthetic
aagguuccagau

SEQ ID NO: 10836 - RNA, 12 nt, Artificial Sequence
  Synthetic
uaagguuccaga

SEQ ID NO: 10837 - RNA, 12 nt, Artificial Sequence
  Synthetic
guaagguuccag

SEQ ID NO: 10838 - RNA, 12 nt, Artificial Sequence
  Synthetic
gguaagguucca

SEQ ID NO: 10839 - RNA, 12 nt, Artificial Sequence
  Synthetic
ugguaagguucc

SEQ ID NO: 10840 - RNA, 12 nt, Artificial Sequence
  Synthetic
gugguaagguuc

SEQ ID NO: 10841 - RNA, 12 nt, Artificial Sequence
  Synthetic
cgugguaagguu

SEQ ID NO: 10842 - RNA, 12 nt, Artificial Sequence
  Synthetic
acgugguaaggu

SEQ ID NO: 10843 - RNA, 12 nt, Artificial Sequence
  Synthetic
aacgugguaagg

SEQ ID NO: 10844 - RNA, 12 nt, Artificial Sequence
  Synthetic
uaacgugguaag

SEQ ID NO: 10845 - RNA, 12 nt, Artificial Sequence
  Synthetic
guaacgugguaa

SEQ ID NO: 10846 - RNA, 12 nt, Artificial Sequence
  Synthetic
aguaacguggua

SEQ ID NO: 10847 - RNA, 12 nt, Artificial Sequence
  Synthetic
caguaacguggu

SEQ ID NO: 10848 - RNA, 12 nt, Artificial Sequence
  Synthetic
gcaguaacgugg

SEQ ID NO: 10849 - RNA, 12 nt, Artificial Sequence
  Synthetic
ugcaguaacgug

SEQ ID NO: 10850 - RNA, 12 nt, Artificial Sequence
  Synthetic
augcaguaacgu

SEQ ID NO: 10851 - RNA, 12 nt, Artificial Sequence
  Synthetic
uaugcaguaacg

SEQ ID NO: 10852 - RNA, 12 nt, Artificial Sequence
  Synthetic
guaugcaguaac

SEQ ID NO: 10853 - RNA, 12 nt, Artificial Sequence
  Synthetic
aguaugcaguaa

SEQ ID NO: 10854 - RNA, 12 nt, Artificial Sequence
  Synthetic
caguaugcagua

SEQ ID NO: 10855 - RNA, 12 nt, Artificial Sequence
  Synthetic
ucaguaugcagu

SEQ ID NO: 10856 - RNA, 12 nt, Artificial Sequence
  Synthetic
aucaguaugcag

SEQ ID NO: 10857 - RNA, 12 nt, Artificial Sequence
  Synthetic
gaucaguaugca

SEQ ID NO: 10858 - RNA, 12 nt, Artificial Sequence
  Synthetic
ggaucaguaugc

SEQ ID NO: 10859 - RNA, 12 nt, Artificial Sequence
  Synthetic
gggaucaguaug

SEQ ID NO: 10860 - RNA, 12 nt, Artificial Sequence
  Synthetic
agggaucaguau

SEQ ID NO: 10861 - RNA, 12 nt, Artificial Sequence
  Synthetic
aagggaucagua

SEQ ID NO: 10862 - RNA, 12 nt, Artificial Sequence
  Synthetic
aaagggaucagu

SEQ ID NO: 10863 - RNA, 12 nt, Artificial Sequence
  Synthetic
gaaagggaucag

SEQ ID NO: 10864 - RNA, 12 nt, Artificial Sequence
  Synthetic
ggaaagggauca

SEQ ID NO: 10865 - RNA, 12 nt, Artificial Sequence
  Synthetic
gggaaagggauc

SEQ ID NO: 10866 - RNA, 12 nt, Artificial Sequence
  Synthetic
ugggaaagggau

SEQ ID NO: 10867 - RNA, 12 nt, Artificial Sequence
  Synthetic
augggaaaggga

SEQ ID NO: 10868 - RNA, 12 nt, Artificial Sequence
  Synthetic
caugggaaaggg

SEQ ID NO: 10869 - RNA, 12 nt, Artificial Sequence
  Synthetic
ucaugggaaagg

SEQ ID NO: 10870 - RNA, 12 nt, Artificial Sequence
  Synthetic
aucaugggaaag

SEQ ID NO: 10871 - RNA, 12 nt, Artificial Sequence
  Synthetic
gaucaugggaaa

SEQ ID NO: 10872 - RNA, 12 nt, Artificial Sequence
  Synthetic
ggaucaugggaa

SEQ ID NO: 10873 - RNA, 12 nt, Artificial Sequence
  Synthetic
uggaucauggga

SEQ ID NO: 10874 - RNA, 12 nt, Artificial Sequence
  Synthetic
cuggaucauggg

SEQ ID NO: 10875 - RNA, 12 nt, Artificial Sequence
  Synthetic
ucuggaucaugg

SEQ ID NO: 10876 - RNA, 12 nt, Artificial Sequence
  Synthetic
uucuggaucaug

SEQ ID NO: 10877 - RNA, 12 nt, Artificial Sequence
  Synthetic
guucuggaucau

SEQ ID NO: 10878 - RNA, 12 nt, Artificial Sequence
  Synthetic
aguucuggauca

SEQ ID NO: 10879 - RNA, 12 nt, Artificial Sequence
  Synthetic
caguucuggauc

SEQ ID NO: 10880 - RNA, 12 nt, Artificial Sequence
  Synthetic
ucaguucuggau

SEQ ID NO: 10881 - RNA, 12 nt, Artificial Sequence
  Synthetic
cucaguucugga

SEQ ID NO: 10882 - RNA, 12 nt, Artificial Sequence
  Synthetic
ccucaguucugg

SEQ ID NO: 10883 - RNA, 12 nt, Artificial Sequence
  Synthetic
accucaguucug

SEQ ID NO: 10884 - RNA, 12 nt, Artificial Sequence
  Synthetic
gaccucaguucu

SEQ ID NO: 10885 - RNA, 12 nt, Artificial Sequence
  Synthetic
ugaccucaguuc

SEQ ID NO: 10886 - RNA, 12 nt, Artificial Sequence
  Synthetic
gugaccucaguu

SEQ ID NO: 10887 - RNA, 12 nt, Artificial Sequence
  Synthetic
agugaccucagu

SEQ ID NO: 10888 - RNA, 12 nt, Artificial Sequence
  Synthetic
cagugaccucag

SEQ ID NO: 10889 - RNA, 12 nt, Artificial Sequence
  Synthetic
ccagugaccuca

SEQ ID NO: 10890 - RNA, 12 nt, Artificial Sequence
  Synthetic
cccagugaccuc

SEQ ID NO: 10891 - RNA, 12 nt, Artificial Sequence
  Synthetic
acccagugaccu

SEQ ID NO: 10892 - RNA, 12 nt, Artificial Sequence
  Synthetic
aacccagugacc

SEQ ID NO: 10893 - RNA, 12 nt, Artificial Sequence
  Synthetic
gaacccagugac

SEQ ID NO: 10894 - RNA, 12 nt, Artificial Sequence
  Synthetic
agaacccaguga

SEQ ID NO: 10895 - RNA, 12 nt, Artificial Sequence
  Synthetic
uagaacccagug

SEQ ID NO: 10896 - RNA, 12 nt, Artificial Sequence
  Synthetic
cuagaacccagu

SEQ ID NO: 10897 - RNA, 12 nt, Artificial Sequence
  Synthetic
ucuagaacccag

SEQ ID NO: 10898 - RNA, 12 nt, Artificial Sequence
  Synthetic
uucuagaaccca

SEQ ID NO: 10899 - RNA, 12 nt, Artificial Sequence
  Synthetic
guucuagaaccc

SEQ ID NO: 10900 - RNA, 12 nt, Artificial Sequence
  Synthetic
gguucuagaacc

SEQ ID NO: 10901 - RNA, 12 nt, Artificial Sequence
  Synthetic
ggguucuagaac

SEQ ID NO: 10902 - RNA, 12 nt, Artificial Sequence
  Synthetic
gggguucuagaa

SEQ ID NO: 10903 - RNA, 12 nt, Artificial Sequence
  Synthetic
ggggguucuaga

SEQ ID NO: 10904 - RNA, 12 nt, Artificial Sequence
  Synthetic
uggggguucuag

SEQ ID NO: 10905 - RNA, 12 nt, Artificial Sequence
  Synthetic
guggggguucua

SEQ ID NO: 10906 - RNA, 12 nt, Artificial Sequence
  Synthetic
uguggggguucu

SEQ ID NO: 10907 - RNA, 12 nt, Artificial Sequence
  Synthetic
auguggggguuc

SEQ ID NO: 10908 - RNA, 12 nt, Artificial Sequence
  Synthetic
aauguggggguu

SEQ ID NO: 10909 - RNA, 12 nt, Artificial Sequence
  Synthetic
aaaugugggggu

SEQ ID NO: 10910 - RNA, 12 nt, Artificial Sequence
  Synthetic
uaaauguggggg

SEQ ID NO: 10911 - RNA, 12 nt, Artificial Sequence
  Synthetic
guaaaugugggg

SEQ ID NO: 10912 - RNA, 12 nt, Artificial Sequence
  Synthetic
gguaaauguggg

SEQ ID NO: 10913 - RNA, 12 nt, Artificial Sequence
  Synthetic
agguaaaugugg

SEQ ID NO: 10914 - RNA, 12 nt, Artificial Sequence
  Synthetic
gagguaaaugug

SEQ ID NO: 10915 - RNA, 12 nt, Artificial Sequence
  Synthetic
cgagguaaaugu

SEQ ID NO: 10916 - RNA, 12 nt, Artificial Sequence
  Synthetic
ucgagguaaaug

SEQ ID NO: 10917 - RNA, 12 nt, Artificial Sequence
  Synthetic
cucgagguaaau

SEQ ID NO: 10918 - RNA, 12 nt, Artificial Sequence
  Synthetic
ccucgagguaaa

SEQ ID NO: 10919 - RNA, 12 nt, Artificial Sequence
  Synthetic
gccucgagguaa

SEQ ID NO: 10920 - RNA, 12 nt, Artificial Sequence
  Synthetic
agccucgaggua

SEQ ID NO: 10921 - RNA, 12 nt, Artificial Sequence
  Synthetic
gagccucgaggu

SEQ ID NO: 10922 - RNA, 12 nt, Artificial Sequence
  Synthetic
agagccucgagg

SEQ ID NO: 10923 - RNA, 12 nt, Artificial Sequence
  Synthetic
aagagccucgag

SEQ ID NO: 10924 - RNA, 12 nt, Artificial Sequence
  Synthetic
gaagagccucga

SEQ ID NO: 10925 - RNA, 12 nt, Artificial Sequence
  Synthetic
ggaagagccucg

SEQ ID NO: 10926 - RNA, 12 nt, Artificial Sequence
  Synthetic
uggaagagccuc

SEQ ID NO: 10927 - RNA, 12 nt, Artificial Sequence
  Synthetic
auggaagagccu

SEQ ID NO: 10928 - RNA, 12 nt, Artificial Sequence
  Synthetic
gauggaagagcc

SEQ ID NO: 10929 - RNA, 12 nt, Artificial Sequence
  Synthetic
ggauggaagagc

SEQ ID NO: 10930 - RNA, 12 nt, Artificial Sequence
  Synthetic
gggauggaagag

SEQ ID NO: 10931 - RNA, 12 nt, Artificial Sequence
  Synthetic
ggggauggaaga

SEQ ID NO: 10932 - RNA, 12 nt, Artificial Sequence
  Synthetic
uggggauggaag

SEQ ID NO: 10933 - RNA, 12 nt, Artificial Sequence
  Synthetic
uuggggauggaa

SEQ ID NO: 10934 - RNA, 12 nt, Artificial Sequence
  Synthetic
uuuggggaugga

SEQ ID NO: 10935 - RNA, 12 nt, Artificial Sequence
  Synthetic
guuuggggaugg

SEQ ID NO: 10936 - RNA, 12 nt, Artificial Sequence
  Synthetic
aguuuggggaug

SEQ ID NO: 10937 - RNA, 12 nt, Artificial Sequence
  Synthetic
caguuuggggau

SEQ ID NO: 10938 - RNA, 12 nt, Artificial Sequence
  Synthetic
acaguuugggga

SEQ ID NO: 10939 - RNA, 12 nt, Artificial Sequence
  Synthetic
cacaguuugggg

SEQ ID NO: 10940 - RNA, 12 nt, Artificial Sequence
  Synthetic
gcacaguuuggg

SEQ ID NO: 10941 - RNA, 12 nt, Artificial Sequence
  Synthetic
ggcacaguuugg

SEQ ID NO: 10942 - RNA, 12 nt, Artificial Sequence
  Synthetic
gggcacaguuug

SEQ ID NO: 10943 - RNA, 12 nt, Artificial Sequence
  Synthetic
agggcacaguuu

SEQ ID NO: 10944 - RNA, 12 nt, Artificial Sequence
  Synthetic
cagggcacaguu

SEQ ID NO: 10945 - RNA, 12 nt, Artificial Sequence
  Synthetic
gcagggcacagu

SEQ ID NO: 10946 - RNA, 12 nt, Artificial Sequence
  Synthetic
ggcagggcacag

SEQ ID NO: 10947 - RNA, 12 nt, Artificial Sequence
  Synthetic
aggcagggcaca

SEQ ID NO: 10948 - RNA, 12 nt, Artificial Sequence
  Synthetic
aaggcagggcac

SEQ ID NO: 10949 - RNA, 12 nt, Artificial Sequence
  Synthetic
gaaggcagggca

SEQ ID NO: 10950 - RNA, 12 nt, Artificial Sequence
  Synthetic
ugaaggcagggc

SEQ ID NO: 10951 - RNA, 12 nt, Artificial Sequence
  Synthetic
cugaaggcaggg

SEQ ID NO: 10952 - RNA, 12 nt, Artificial Sequence
  Synthetic
gcugaaggcagg

SEQ ID NO: 10953 - RNA, 12 nt, Artificial Sequence
  Synthetic
agcugaaggcag

SEQ ID NO: 10954 - RNA, 12 nt, Artificial Sequence
  Synthetic
aagcugaaggca

SEQ ID NO: 10955 - RNA, 12 nt, Artificial Sequence
  Synthetic
aaagcugaaggc

SEQ ID NO: 10956 - RNA, 12 nt, Artificial Sequence
  Synthetic
caaagcugaagg

SEQ ID NO: 10957 - RNA, 12 nt, Artificial Sequence
  Synthetic
ccaaagcugaag

SEQ ID NO: 10958 - RNA, 12 nt, Artificial Sequence
  Synthetic
accaaagcugaa

SEQ ID NO: 10959 - RNA, 12 nt, Artificial Sequence
  Synthetic
caccaaagcuga

SEQ ID NO: 10960 - RNA, 12 nt, Artificial Sequence
  Synthetic
ucaccaaagcug

SEQ ID NO: 10961 - RNA, 12 nt, Artificial Sequence
  Synthetic
uucaccaaagcu

SEQ ID NO: 10962 - RNA, 12 nt, Artificial Sequence
  Synthetic
uuucaccaaagc

SEQ ID NO: 10963 - RNA, 12 nt, Artificial Sequence
  Synthetic
cuuucaccaaag

SEQ ID NO: 10964 - RNA, 12 nt, Artificial Sequence
  Synthetic
ccuuucaccaaa

SEQ ID NO: 10965 - RNA, 12 nt, Artificial Sequence
  Synthetic
cccuuucaccaa

SEQ ID NO: 10966 - RNA, 12 nt, Artificial Sequence
  Synthetic
ucccuuucacca

SEQ ID NO: 10967 - RNA, 12 nt, Artificial Sequence
  Synthetic
cucccuuucacc

SEQ ID NO: 10968 - RNA, 12 nt, Artificial Sequence
  Synthetic
ccucccuuucac

SEQ ID NO: 10969 - RNA, 12 nt, Artificial Sequence
  Synthetic
cccucccuuuca

SEQ ID NO: 10970 - RNA, 12 nt, Artificial Sequence
  Synthetic
gcccucccuuuc

SEQ ID NO: 10971 - RNA, 12 nt, Artificial Sequence
  Synthetic
ggcccucccuuu

SEQ ID NO: 10972 - RNA, 12 nt, Artificial Sequence
  Synthetic
gggcccucccuu

SEQ ID NO: 10973 - RNA, 12 nt, Artificial Sequence
  Synthetic
ggggcccucccu

SEQ ID NO: 10974 - RNA, 12 nt, Artificial Sequence
  Synthetic
aggggcccuccc

SEQ ID NO: 10975 - RNA, 12 nt, Artificial Sequence
  Synthetic
gaggggcccucc

SEQ ID NO: 10976 - RNA, 12 nt, Artificial Sequence
  Synthetic
ugaggggcccuc

SEQ ID NO: 10977 - RNA, 12 nt, Artificial Sequence
  Synthetic
augaggggcccu

SEQ ID NO: 10978 - RNA, 12 nt, Artificial Sequence
  Synthetic
caugaggggccc

SEQ ID NO: 10979 - RNA, 12 nt, Artificial Sequence
  Synthetic
acaugaggggcc

SEQ ID NO: 10980 - RNA, 12 nt, Artificial Sequence
  Synthetic
cacaugaggggc

SEQ ID NO: 10981 - RNA, 12 nt, Artificial Sequence
  Synthetic
acacaugagggg

SEQ ID NO: 10982 - RNA, 12 nt, Artificial Sequence
  Synthetic
cacacaugaggg

SEQ ID NO: 10983 - RNA, 12 nt, Artificial Sequence
  Synthetic
gcacacaugagg

SEQ ID NO: 10984 - RNA, 12 nt, Artificial Sequence
  Synthetic
agcacacaugag

SEQ ID NO: 10985 - RNA, 12 nt, Artificial Sequence
  Synthetic
cagcacacauga

SEQ ID NO: 10986 - RNA, 12 nt, Artificial Sequence
  Synthetic
acagcacacaug

SEQ ID NO: 10987 - RNA, 12 nt, Artificial Sequence
  Synthetic
cacagcacacau

SEQ ID NO: 10988 - RNA, 12 nt, Artificial Sequence
  Synthetic
gcacagcacaca

SEQ ID NO: 10989 - RNA, 12 nt, Artificial Sequence
  Synthetic
agcacagcacac

SEQ ID NO: 10990 - RNA, 12 nt, Artificial Sequence
  Synthetic
cagcacagcaca

SEQ ID NO: 10991 - RNA, 12 nt, Artificial Sequence
  Synthetic
acagcacagcac

SEQ ID NO: 10992 - RNA, 12 nt, Artificial Sequence
  Synthetic
cacagcacagca

SEQ ID NO: 10993 - RNA, 12 nt, Artificial Sequence
  Synthetic
acacagcacagc

SEQ ID NO: 10994 - RNA, 12 nt, Artificial Sequence
  Synthetic
gacacagcacag

SEQ ID NO: 10995 - RNA, 12 nt, Artificial Sequence
  Synthetic
agacacagcaca

SEQ ID NO: 10996 - RNA, 12 nt, Artificial Sequence
  Synthetic
cagacacagcac

SEQ ID NO: 10997 - RNA, 12 nt, Artificial Sequence
  Synthetic
gcagacacagca

SEQ ID NO: 10998 - RNA, 12 nt, Artificial Sequence
  Synthetic
ugcagacacagc

SEQ ID NO: 10999 - RNA, 12 nt, Artificial Sequence
  Synthetic
gugcagacacag

SEQ ID NO: 11000 - RNA, 12 nt, Artificial Sequence
  Synthetic
ggugcagacaca

SEQ ID NO: 11001 - RNA, 12 nt, Artificial Sequence
  Synthetic
cggugcagacac

SEQ ID NO: 11002 - RNA, 12 nt, Artificial Sequence
  Synthetic
gcggugcagaca

SEQ ID NO: 11003 - RNA, 12 nt, Artificial Sequence
  Synthetic
agcggugcagac

SEQ ID NO: 11004 - RNA, 12 nt, Artificial Sequence
  Synthetic
aagcggugcaga

SEQ ID NO: 11005 - RNA, 12 nt, Artificial Sequence
  Synthetic
caagcggugcag

SEQ ID NO: 11006 - RNA, 12 nt, Artificial Sequence
  Synthetic
ccaagcggugca

SEQ ID NO: 11007 - RNA, 12 nt, Artificial Sequence
  Synthetic
accaagcggugc

SEQ ID NO: 11008 - RNA, 12 nt, Artificial Sequence
  Synthetic
aaccaagcggug

SEQ ID NO: 11009 - RNA, 12 nt, Artificial Sequence
  Synthetic
aaaccaagcggu

SEQ ID NO: 11010 - RNA, 12 nt, Artificial Sequence
  Synthetic
caaaccaagcgg

SEQ ID NO: 11011 - RNA, 12 nt, Artificial Sequence
  Synthetic
gcaaaccaagcg

SEQ ID NO: 11012 - RNA, 12 nt, Artificial Sequence
  Synthetic
ugcaaaccaagc

SEQ ID NO: 11013 - RNA, 12 nt, Artificial Sequence
  Synthetic
cugcaaaccaag

SEQ ID NO: 11014 - RNA, 12 nt, Artificial Sequence
  Synthetic
acugcaaaccaa

SEQ ID NO: 11015 - RNA, 12 nt, Artificial Sequence
  Synthetic
aacugcaaacca

SEQ ID NO: 11016 - RNA, 12 nt, Artificial Sequence
  Synthetic
caacugcaaacc

SEQ ID NO: 11017 - RNA, 12 nt, Artificial Sequence
  Synthetic
ucaacugcaaac

SEQ ID NO: 11018 - RNA, 12 nt, Artificial Sequence
  Synthetic
cucaacugcaaa

SEQ ID NO: 11019 - RNA, 12 nt, Artificial Sequence
  Synthetic
ucucaacugcaa

SEQ ID NO: 11020 - RNA, 12 nt, Artificial Sequence
  Synthetic
cucucaacugca

SEQ ID NO: 11021 - RNA, 12 nt, Artificial Sequence
  Synthetic
ccucucaacugc

SEQ ID NO: 11022 - RNA, 12 nt, Artificial Sequence
  Synthetic
cccucucaacug

SEQ ID NO: 11023 - RNA, 12 nt, Artificial Sequence
  Synthetic
ccccucucaacu

SEQ ID NO: 11024 - RNA, 12 nt, Artificial Sequence
  Synthetic
uccccucucaac

SEQ ID NO: 11025 - RNA, 12 nt, Artificial Sequence
  Synthetic
cuccccucucaa

SEQ ID NO: 11026 - RNA, 12 nt, Artificial Sequence
  Synthetic
ccuccccucuca

SEQ ID NO: 11027 - RNA, 12 nt, Artificial Sequence
  Synthetic
cccuccccucuc

SEQ ID NO: 11028 - RNA, 12 nt, Artificial Sequence
  Synthetic
gcccuccccucu

SEQ ID NO: 11029 - RNA, 12 nt, Artificial Sequence
  Synthetic
ugcccuccccuc

SEQ ID NO: 11030 - RNA, 12 nt, Artificial Sequence
  Synthetic
cugcccuccccu

SEQ ID NO: 11031 - RNA, 12 nt, Artificial Sequence
  Synthetic
ccugcccucccc

SEQ ID NO: 11032 - RNA, 12 nt, Artificial Sequence
  Synthetic
uccugcccuccc

SEQ ID NO: 11033 - RNA, 12 nt, Artificial Sequence
  Synthetic
cuccugcccucc

SEQ ID NO: 11034 - RNA, 12 nt, Artificial Sequence
  Synthetic
ccuccugcccuc

SEQ ID NO: 11035 - RNA, 12 nt, Artificial Sequence
  Synthetic
cccuccugcccu

SEQ ID NO: 11036 - RNA, 12 nt, Artificial Sequence
  Synthetic
ccccuccugccc

SEQ ID NO: 11037 - RNA, 12 nt, Artificial Sequence
  Synthetic
accccuccugcc

SEQ ID NO: 11038 - RNA, 12 nt, Artificial Sequence
  Synthetic
caccccuccugc

SEQ ID NO: 11039 - RNA, 12 nt, Artificial Sequence
  Synthetic
acaccccuccug

SEQ ID NO: 11040 - RNA, 12 nt, Artificial Sequence
  Synthetic
cacaccccuccu

SEQ ID NO: 11041 - RNA, 12 nt, Artificial Sequence
  Synthetic
ucacaccccucc

SEQ ID NO: 11042 - RNA, 12 nt, Artificial Sequence
  Synthetic
aucacaccccuc

SEQ ID NO: 11043 - RNA, 12 nt, Artificial Sequence
  Synthetic
aaucacaccccu

SEQ ID NO: 11044 - RNA, 12 nt, Artificial Sequence
  Synthetic
caaucacacccc

SEQ ID NO: 11045 - RNA, 12 nt, Artificial Sequence
  Synthetic
ccaaucacaccc

SEQ ID NO: 11046 - RNA, 12 nt, Artificial Sequence
  Synthetic
uccaaucacacc

SEQ ID NO: 11047 - RNA, 12 nt, Artificial Sequence
  Synthetic
cuccaaucacac

SEQ ID NO: 11048 - RNA, 12 nt, Artificial Sequence
  Synthetic
acuccaaucaca

SEQ ID NO: 11049 - RNA, 12 nt, Artificial Sequence
  Synthetic
cacuccaaucac

SEQ ID NO: 11050 - RNA, 12 nt, Artificial Sequence
  Synthetic
acacuccaauca

SEQ ID NO: 11051 - RNA, 12 nt, Artificial Sequence
  Synthetic
cacacuccaauc

SEQ ID NO: 11052 - RNA, 12 nt, Artificial Sequence
  Synthetic
acacacuccaau

SEQ ID NO: 11053 - RNA, 12 nt, Artificial Sequence
  Synthetic
gacacacuccaa

SEQ ID NO: 11054 - RNA, 12 nt, Artificial Sequence
  Synthetic
ggacacacucca

SEQ ID NO: 11055 - RNA, 12 nt, Artificial Sequence
  Synthetic
cggacacacucc

SEQ ID NO: 11056 - RNA, 12 nt, Artificial Sequence
  Synthetic
ccggacacacuc

SEQ ID NO: 11057 - RNA, 12 nt, Artificial Sequence
  Synthetic
uccggacacacu

SEQ ID NO: 11058 - RNA, 12 nt, Artificial Sequence
  Synthetic
cuccggacacac

SEQ ID NO: 11059 - RNA, 12 nt, Artificial Sequence
  Synthetic
ucuccggacaca

SEQ ID NO: 11060 - RNA, 12 nt, Artificial Sequence
  Synthetic
aucuccggacac

SEQ ID NO: 11061 - RNA, 12 nt, Artificial Sequence
  Synthetic
caucuccggaca

SEQ ID NO: 11062 - RNA, 12 nt, Artificial Sequence
  Synthetic
ucaucuccggac

SEQ ID NO: 11063 - RNA, 12 nt, Artificial Sequence
  Synthetic
cucaucuccgga

SEQ ID NO: 11064 - RNA, 12 nt, Artificial Sequence
  Synthetic
ucucaucuccgg

SEQ ID NO: 11065 - RNA, 12 nt, Artificial Sequence
  Synthetic
aucucaucuccg

SEQ ID NO: 11066 - RNA, 12 nt, Artificial Sequence
  Synthetic
caucucaucucc

SEQ ID NO: 11067 - RNA, 12 nt, Artificial Sequence
  Synthetic
ucaucucaucuc

SEQ ID NO: 11068 - RNA, 12 nt, Artificial Sequence
  Synthetic
uucaucucaucu

SEQ ID NO: 11069 - RNA, 12 nt, Artificial Sequence
  Synthetic
uuucaucucauc

SEQ ID NO: 11070 - RNA, 12 nt, Artificial Sequence
  Synthetic
uuuucaucucau

SEQ ID NO: 11071 - RNA, 12 nt, Artificial Sequence
  Synthetic
uuuuucaucuca

SEQ ID NO: 11072 - RNA, 12 nt, Artificial Sequence
  Synthetic
uuuuuucaucuc

SEQ ID NO: 11073 - RNA, 12 nt, Artificial Sequence
  Synthetic
uuuuuuucaucu

SEQ ID NO: 11074 - RNA, 12 nt, Artificial Sequence
  Synthetic
auuuuuuucauc

SEQ ID NO: 11075 - RNA, 12 nt, Artificial Sequence
  Synthetic
uauuuuuuucau

SEQ ID NO: 11076 - RNA, 12 nt, Artificial Sequence
  Synthetic
guauuuuuuuca

SEQ ID NO: 11077 - RNA, 12 nt, Artificial Sequence
  Synthetic
uguauuuuuuuc

SEQ ID NO: 11078 - RNA, 12 nt, Artificial Sequence
  Synthetic
auguauuuuuuu

SEQ ID NO: 11079 - RNA, 12 nt, Artificial Sequence
  Synthetic
gauguauuuuuu

SEQ ID NO: 11080 - RNA, 12 nt, Artificial Sequence
  Synthetic
agauguauuuuu

SEQ ID NO: 11081 - RNA, 12 nt, Artificial Sequence
  Synthetic
uagauguauuuu

SEQ ID NO: 11082 - RNA, 12 nt, Artificial Sequence
  Synthetic
auagauguauuu

SEQ ID NO: 11083 - RNA, 12 nt, Artificial Sequence
  Synthetic
uauagauguauu

SEQ ID NO: 11084 - RNA, 12 nt, Artificial Sequence
  Synthetic
auauagauguau

SEQ ID NO: 11085 - RNA, 12 nt, Artificial Sequence
  Synthetic
aauauagaugua

SEQ ID NO: 11086 - RNA, 12 nt, Artificial Sequence
  Synthetic
aaauauagaugu

SEQ ID NO: 11087 - RNA, 12 nt, Artificial Sequence
  Synthetic
uaaauauagaug

SEQ ID NO: 11088 - RNA, 12 nt, Artificial Sequence
  Synthetic
uuaaauauagau

SEQ ID NO: 11089 - RNA, 12 nt, Artificial Sequence
  Synthetic
cuuaaauauaga

SEQ ID NO: 11090 - RNA, 12 nt, Artificial Sequence
  Synthetic
ucuuaaauauag

SEQ ID NO: 11091 - RNA, 12 nt, Artificial Sequence
  Synthetic
uucuuaaauaua

SEQ ID NO: 11092 - RNA, 12 nt, Artificial Sequence
  Synthetic
auucuuaaauau

SEQ ID NO: 11093 - RNA, 12 nt, Artificial Sequence
  Synthetic
gauucuuaaaua

SEQ ID NO: 11094 - RNA, 12 nt, Artificial Sequence
  Synthetic
ggauucuuaaau

SEQ ID NO: 11095 - RNA, 12 nt, Artificial Sequence
  Synthetic
gggauucuuaaa

SEQ ID NO: 11096 - RNA, 12 nt, Artificial Sequence
  Synthetic
ugggauucuuaa

SEQ ID NO: 11097 - RNA, 12 nt, Artificial Sequence
  Synthetic
uugggauucuua

SEQ ID NO: 11098 - RNA, 12 nt, Artificial Sequence
  Synthetic
uuugggauucuu

SEQ ID NO: 11099 - RNA, 12 nt, Artificial Sequence
  Synthetic
uuuugggauucu

SEQ ID NO: 11100 - RNA, 12 nt, Artificial Sequence
  Synthetic
uuuuugggauuc

SEQ ID NO: 11101 - RNA, 12 nt, Artificial Sequence
  Synthetic
uuuuuugggauu

SEQ ID NO: 11102 - RNA, 12 nt, Artificial Sequence
  Synthetic
uuuuuuugggau

SEQ ID NO: 11103 - RNA, 12 nt, Artificial Sequence
  Synthetic
uuuuuuuuggga

SEQ ID NO: 11104 - RNA, 12 nt, Artificial Sequence
  Synthetic
uuuuuuuuuggg

SEQ ID NO: 11105 - RNA, 12 nt, Artificial Sequence
  Synthetic
uuuuuuuuuugg

SEQ ID NO: 11106 - RNA, 12 nt, Artificial Sequence
  Synthetic
uuuuuuuuuuug

SEQ ID NO: 11107 - RNA, 12 nt, Artificial Sequence
  Synthetic
uuuuuuuuuuuu

SEQ ID NO: 11108 - protein, 9 aa, Artificial Sequence
  Synthetic
CQAQGQLVC

SEQ ID NO: 11109 - protein, 9 aa, Artificial Sequence
  Synthetic
CSERSMNFC

SEQ ID NO: 11110 - protein, 9 aa, Artificial Sequence
  Synthetic
CPKTRRVPC

SEQ ID NO: 11111 - protein, 20 aa, Artificial Sequence
  Synthetic
WLSEAGPVVTVRALRGTGSW

SEQ ID NO: 11112 - protein, 9 aa, Artificial Sequence
  Synthetic
CMQHSMRVC

SEQ ID NO: 11113 - protein, 7 aa, Artificial Sequence
  Synthetic
DDTRHWG

1. A complex comprising a muscle-targeting agent covalently linked to an oligonucleotide comprising an antisense strand targeting a glycogen synthase 1 (GYS1) RNA, wherein the antisense strand comprises a region of complementarity to a target sequence as set forth in any one of SEQ ID NOs: 266-7493 and SEQ ID NOs: 162-186, wherein the region of complementarity is at least 12 consecutive nucleosides in length.

2. The complex of claim 1, wherein the muscle-targeting agent is an anti-transferrin receptor 1 (TfR1) antibody.

3. The complex of claim 1, wherein the region of complementary is at least 16 nucleotides in length.

4. The complex of claim 1, wherein the antisense strand comprises the nucleotide sequence of any one of SEQ ID NOs: 7494-11107 and 212-236, wherein each of the Us are optionally and independently Ts.

5. The complex of claim 1, wherein the antisense strand is 18-25 nucleotides in length, optionally wherein the antisense strand is 23 nucleotides in length.

6. The complex of claim 1, wherein the oligonucleotide further comprises a sense strand which comprises at least 18 consecutive nucleosides complementary to the antisense strand.

7. The complex of claim 6, wherein the antisense strand comprises the nucleotide sequence of any one of SEQ ID NOs: 212-236 and the sense strand comprises the nucleotide sequence of any one of SEQ ID NOs: 187-211, wherein each of the Us are optionally and independently Ts.

8. The complex of claim 1, wherein the oligonucleotide comprises one or more modified nucleosides selected from: 2′-fluoro (2′-F), 2′-O-methyl (2′-O-Me), 2′-O-methoxyethyl (2′-MOE), 2′-O-aminopropyl (2′-O-AP), 2′-O-dimethylaminoethyl (2′-O-DMAOE), 2′-O-dimethylaminopropyl (2′-O-DMAP), 2′-O-dimethylaminoethyloxyethyl (2′-O-DMAEOE), 2′-O—N-methylacetamido (2′-O-NMA)).

9. (canceled)

10. The complex of claim 8, wherein one or more modified nucleosides are 2′ modified nucleotides, optionally wherein each 2′ modified nucleotide is 2′-O-methyl or 2′-fluoro (2′-F).

11. The complex of claim 1, wherein the oligonucleotide comprises one or more phosphorothioate internucleoside linkages.

12. (canceled)

13. The complex of claim 1, wherein the antisense strand comprises two phosphorothioate internucleoside linkages.

14. The complex of claim 3, wherein the two internucleoside linkages at the 3′ end of the antisense strand are phosphorothioate internucleoside linkages.

15. The complex of claim 1, wherein the antisense strand is selected from the modified version of SEQ ID NOs: 212-236 listed in Table 8.

16. The complex of claim 6, wherein the sense strand is selected from the modified version of SEQ ID NOs: 187-211 listed in Table 8.

17. The complex of claim 1, wherein the oligonucleotide is an siRNA molecule selected from the siRNAs listed in Table 8.

18.-20. (canceled)

21. The complex of claim 1, wherein the muscle targeting agent and the oligonucleotide are covalently linked via a linker, optionally wherein the linker comprises a valine-citrulline sequence.

22. A method of reducing GYS1 expression in a muscle cell, the method comprising contacting the muscle cell with an effective amount of the complex of claim 1 for promoting internalization of the RNAi oligonucleotide to the muscle cell.

23. (canceled)

24. A method of treating Pompe disease (PD), the method comprising administering to a subject in need thereof an effective amount of the complex of claim 1.

25. An siRNA oligonucleotide comprising a pair of an antisense strand and a sense strand selected from the following pairs:
Antisense strand:
(SEQ ID NO: 212)
5′-fUfCmGfAmAfUmUfCmAfUmCfCmUfCmCfCmAfGmUfCmC
*fU*mC-3′
Sense strand:
(SEQ ID NO: 187)
5′-mGmGfAmCfUmGfGmGfAmGfGmAfUmGfAmAfUmUfCmGfA
-3′
Antisense strand:
(SEQ ID NO: 213)
5′-fGfUmCfGmAfAmUfUmCfAmUfCmCfUmCfCmCfAmGfUmC
*fC*mU-3′
Sense strand:
(SEQ ID NO: 188)
5′-mGmAfCmUfGmGfGmAfGmGfAmUfGmAfAmUfUmCfGmAfC
-3′
Antisense strand:
(SEQ ID NO: 214)
5′-fUfAmGfAmUfGmCfCmAfCmCfCmAfCmCfUmUfGmUfUmA
*fG*mC-3′
Sense strand:
(SEQ ID NO: 189)
5′-mUmAfAmCfAmAfGmGfUmGfGmGfUmGfGmCfAmUfCmUfA
-3′
Antisense strand:
(SEQ ID NO: 215)
5′-fUfGmUfAmGfAmUfGmCfCmAfCmCfCmAfCmCfUmUfGmU
*fU*mA-3′
Sense strand:
(SEQ ID NO: 190)
5′-mAmCfAmAfGmGfUmGfGmGfUmGfGmCfAmUfCmUfAmCfA
-3′
Antisense strand:
(SEQ ID NO: 216)
5′-fCfUmUfCmGfCmCfUmUfCmGfUmCfUmGfCmAfGmCfAmC
*fC*mG-3′
Sense strand:
(SEQ ID NO: 191)
5′-mGmUfGmCfUmGfCmAfGmAfCmGfAmAfGmGfCmGfAmAfG
-3′
Antisense strand:
(SEQ ID NO: 217)
5′-fAfCmCfUmUfCmGfCmCfUmUfCmGfUmCfUmGfCmAfGmC
*fA*mC-3′
Sense strand:
(SEQ ID NO: 192)
5′-mGmCfUmGfCmAfGmAfCmGfAmAfGmGfCmGfAmAfGmGfU
-3′
Antisense strand:
(SEQ ID NO: 218)
5′-fUfCmAfCmCfUmUfCmGfCmCfUmUfCmGfUmCfUmGfCmA
*fG*mC-3′
Sense strand:
(SEQ ID NO: 193)
5′-mUmGfCmAfGmAfCmGfAmAfGmGfCmGfAmAfGmGfUmGfA
-3′
Antisense strand:
(SEQ ID NO: 219)
5′-fGfUmCfAmCfCmUfUmCfGmCfCmUfUmCfGmUfCmUfGmC
*fA*mG-3′
Sense strand:
(SEQ ID NO: 194)
5′-mGmCfAmGfAmCfGmAfAmGfGmCfGmAfAmGfGmUfGmAfC
-3′
Antisense strand:
(SEQ ID NO: 220)
5′-fCfCmCfUmUfGmCfUmGfUmUfCmAfUmGfGmAfAmUfCmC
*fA*mG-3′
Sense strand:
(SEQ ID NO: 195)
5′-mGmGfAmUfUmCfCmAfUmGfAmAfCmAfGmCfAmAfGmGfG
-3′
Antisense strand:
(SEQ ID NO: 221)
5′-fCfCmAfGmGfUmUfGmUfUmGfUmAfGmAfAmGfUmCfCmA
*fC*mG-3′
Sense strand:
(SEQ ID NO: 196)
5′-mUmGfGmAfCmUfUmCfUmAfCmAfAmCfAmAfCmCfUmGfG
-3′
Antisense strand:
(SEQ ID NO: 222)
5′-fCfUmGfAmGfCmAfGmAfUmAfGmUfUmGfAmGfCmCfGmA
*fG*mC-3′
Sense strand:
(SEQ ID NO: 197)
5′-mUmCfGmGfCmUfCmAfAmCfUmAfUmCfUmGfCmUfCmAfG
-3′
Antisense strand:
(SEQ ID NO: 223)
5′-fUfCmUfGmAfGmCfAmGfAmUfAmGfUmUfGmAfGmCfCmG
*fA*mG-3′
Sense strand:
(SEQ ID NO: 198)
5′-mCmGfGmCfUmCfAmAfCmUfAmUfCmUfGmCfUmCfAmGfA
-3′
Antisense strand:
(SEQ ID NO: 224)
5′-fCfAmCfUmCfUmGfAmGfCmAfGmAfUmAfGmUfUmGfAmG
*fC*mC-3′
Sense strand:
(SEQ ID NO: 199)
5′-mCmUfCmAfAmCfUmAfUmCfUmGfCmUfCmAfGmAfGmUfG
-3′
Antisense strand:
(SEQ ID NO: 225)
5′-fUfUmCfAmCfUmCfUmGfAmGfCmAfGmAfUmAfGmUfUmG
*fA*mG-3′
Sense strand:
(SEQ ID NO: 200)
5′-mCmAfAmCfUmAfUmCfUmGfCmUfCmAfGmAfGmUfGmAfA
-3′
Antisense strand:
(SEQ ID NO: 226)
5′-fCfCmAfGmCfAmUfCmUfUmGfUmUfCmAfUmGfUmCfGmG
*fG*mA-3′
Sense strand:
(SEQ ID NO: 201)
5′-mCmCfGmAfCmAfUmGfAmAfCmAfAmGfAmUfGmCfUmGfG
-3′
Antisense strand:
(SEQ ID NO: 227)
5′-fUfGmGfCmUfCmUfCmUfUmCfAmUfCmAfUmAfGmUfGmA
*fA*mG-3′
Sense strand:
(SEQ ID NO: 202)
5′-mUmCfAmCfUmAfUmGfAmUfGmAfAmGfAmGfAmGfCmCfA
-3′
Antisense strand:
(SEQ ID NO: 228)
5′-fAfUmUfCmGfGmCfGmGfAmUfGmGfUmGfGmUfCmAfGmG
*fA*mU-3′
Sense strand:
(SEQ ID NO: 203)
5′-mCmCfUmGfAmCfCmAfCmCfAmUfCmCfGmCfCmGfAmAfU
-3′
Antisense strand:
(SEQ ID NO: 229)
5′-fCfUmGfCmGfAmUfGmUfGmUfUmCfCmUfCmCfAmUfGmA
*fA*mG-3′
Sense strand:
(SEQ ID NO: 204)
5′-mUmCfAmUfGmGfAmGfGmAfAmCfAmCfAmUfCmGfCmAfG
-3′
Antisense strand:
(SEQ ID NO: 230)
5′-fUfCmUfGmCfGmAfUmGfUmGfUmUfCmCfUmCfCmAfUmG
*fA*mA-3′
Sense strand:
(SEQ ID NO: 205)
5′-mCmAfUmGfGmAfGmGfAmAfCmAfCmAfUmCfGmCfAmGfA
-3′
Antisense strand:
(SEQ ID NO: 231)
5′-fGfAmAfUmCfAmUfCmCfAmGfGmCfUmGfCmGfGmAfAmC
*fC*mG-3′
Sense strand:
(SEQ ID NO: 206)
5′-mGmUfUmCfCmGfCmAfGmCfCmUfGmGfAmUfGmAfUmUfC
-3′
Antisense strand:
(SEQ ID NO: 232)
5′-fGfCmCfAmUfGmUfGmGfCmGfCmGfCmAfGmAfCmAfUmA
*fU*mA-3′
Sense strand:
(SEQ ID NO: 207)
5′-mUmAfUmGfUmCfUmGfCmGfCmGfCmCfAmCfAmUfGmGfC
-3′
Antisense strand:
(SEQ ID NO: 233)
5′-fGfCmUfCmUfCmUfUmCfAmUfCmAfUmAfGmUfGmAfAmG
*fU*mC-3′
Sense strand:
(SEQ ID NO: 208)
5′-mCmUfUmCfAmCfUmAfUmGfAmUfGmAfAmGfAmGfAmGfC
-3′
Antisense strand:
(SEQ ID NO: 234)
5′-fAfAmCfUmUfCmUfUmCfAmCfAmUfUmCfAmGfCmCfCmA
*fU*mU-3′
Sense strand:
(SEQ ID NO: 209)
5′-mUmGfGmGfCmUfGmAfAmUfGmUfGmAfAmGfAmAfGmUfU
-3′
Antisense strand:
(SEQ ID NO: 235)
5′-fUfUmGfCmUfGmUfUmCfAmUfGmGfAmAfUmCfCmAfGmU
*fG*mU-3′
Sense strand:
(SEQ ID NO: 210)
5′-mAmCfUmGfGmAfUmUfCmCfAmUfGmAfAmCfAmGfCmAfA
-3′
Antisense strand:
(SEQ ID NO: 236)
5′-fUfUmCfUmCfCmAfGmGfUmUfGmUfUmGfUmAfGmAfAmG
*fU*mC-3′
Sense strand:
(SEQ ID NO: 211)
5′-mCmUfUmCfUmAfCmAfAmCfAmAfCmCfUmGfGmAfGmAfA
-3′
wherein “m” is 2′-O-methyl (2′-O-Me); “f” is 2′-fluoro (2′-F); “*” indicates phosphorothioate internucleoside linkage; and the absence of “*” between nucleosides indicate a phosphodiester linkage.

26. A composition comprising the siRNA oligonucleotide of claim 25 in sodium salt form.
